(19) United States
(12) Patent Application Publication
(10) Pub. No.: US 2025/0313837 A1
(43) Pub. Date: Oct. 9, 2025

(54) PRODUCTS AND COMPOSITIONS

(71) Applicant: Sirnaomics, Inc., Germantown, MD (US)

(72) Inventor: Dmitry SAMARSKY, Germantown, MD (US)

(21) Appl. No.: 18/982,618

(22) Filed: Dec. 16, 2024

Related U.S. Application Data
(63) Continuation of application No. PCT/US23/68523, filed on Jun. 15, 2023.
(60) Provisional application No. 63/352,503, filed on Jun. 15, 2022.
(60) Provisional application No. 63/408,318, filed on Sep. 20, 2022.

(51) Int. Cl. C12N 15/113

(52) U.S. Cl. CPC C12N 15/113; C12N 2310/14; C12N 2310/351; C12N 2310/531

(57) ABSTRACT

The present disclosure relates to products, and compositions, and their uses. In particular, the present disclosure relates to nucleic acid products that modulate, in particular interfere with or inhibit C5 gene expression. The products can be oligomeric compounds that comprise at least a first region of linked nucleosides having at least a first nucleobase sequence that is at least partially complementary to at least a portion of RNA transcribed from a C5 gene.

### RELATED APPLICATIONS

[0001] The present application is a continuation of International Application No. PCT/US2023/068523, filed on Jun. 15, 2023, which claims the benefit of and priority to U.S. Provisional Patent Application No. 63/352,503, filed on Jun. 15, 2022 and U.S. Provisional Patent Application No. 63/408,318, filed on Sep. 20, 2022, both of which are incorporated herein by reference in their entireties.

### SEQUENCE LISTING

[0002] The instant application contains a sequence listing which has been submitted electronically in XML format and is hereby incorporated by reference in its entirety. Said XML document, created on Jun. 8, 2023, is named 4690_0070I_SL and is 4587 kilobytes in size.

### FIELD

[0003] The present disclosure relates to products, compositions, and their uses. In particular, the present disclosure relates to nucleic acid products that modulate, in particular interfere with or inhibit, complement component C5 gene expression. Embodiments of the present disclosure can therefore provide methods, compounds, and compositions for reducing expression of C5 mRNA and protein in an animal. Such methods, compounds, and compositions are useful to treat, prevent, or ameliorate complement system-associated including C5-associated disorders such as paroxysmal nocturnal hemoglobinuria (PNH), Alzheimer's disease, Atherosclerosis, Inflammation of the choroid plexus, Generalized myasthenia gravis (gMG), amyotrophic lateral sclerosis (ALS), Lupus nephritis (LN), Central nervous system (CNS) diseases; Age-related macular degeneration (AMD) and/or Geographic atrophy (GA); Uveitis and/or panuveitis; Cold agglutinin disease, Membranoproliferative glomerulonephritis (MPGN), Guillain-Barré syndrome, Shiga toxin-producing E. coli hemolytic-uremic syndrome (STEC-HUS) and organ transplantation-associated autoimmune diseases.

### BACKGROUND

[0004] The complement system is part of the innate immune system. Compared to the adaptive immune system, it is evolutionary older and conserved across most taxa. Its function includes decorating microbes of potentially pathogenic nature (a process referred to as opsonization) and target them for destruction, which is effected by a macromolecular assembly known as the membrane attachment complex (MAC). Certain components of the complement system, once activated, contribute to chemoattraction and activation of leukocytes.

[0005] Complement activation may be triggered by various factors, which all involve presence of microbes but may also involve components of the adaptive immune system such as Ig including IgM. Three main pathways of complement activation have been recognized and are referred to as classical pathway, alternative pathway and lectin pathway.

[0006] In functional terms, complement activation occurs inherently at a low level (spontaneous cleavage of C3 to yield C3a and C3b) and is reinforced in the presence of microbes via an enzymatic cascade converting inactive forms of enzymes (zymogenes) into their active counterparts. The term “convertase”, such as C3 convertase, is primarily a functional term and may refer to structurally distinct complexes. One type of C3 convertases is a complex of C3b and complement factor B (CFB, Factor B). Once formed, a C3 convertase can convert large amounts of C3 into its cleavage products C3a and C3b within short amount of time. The specific C3 convertase, which is a complex of C3b and Factor B, has originally been described in the context of the alternative pathway, but may form also in the context of the other two pathways. Within the alternative pathway, Factor B is also a constituent of C5 convertase, a complex which converts C5, a more downstream component of the pathway, into its active form. The formation of C5 by C5 convertase, cleaving C5 into C5b and C5a is the initiating event in the late steps of complement activation. Based on C5b, the membrane attack complex (MAC) is formed which lyses a target membrane by building a pore out of C9 molecules.

### Disease

[0007] The complement system is generally triggered by patterns of binding sites on surfaces. These binding sites may be constituents of a microbe or pathogen, but may also be antibodies which previously bound to any target. In the latter case, the complement system acts to reinforce the adaptive immune system. As a consequence, and in case the mentioned antibodies are autoantibodies, the complement system exacerbates an undesirable autoimmune reaction. Interfering with the complement system in such a setting is a means to treat or ameliorate autoimmune diseases. Since the complement system, more specifically C1 of the classical pathway recognizes the constant portions of antibodies, interfering with the complement system opens an avenue to generally interfering with auto-immune disorder without particular limitation. Having the that, experience tells that autoimmune disorders affect skin, joints and kidneys more frequently than other organs.

[0008] On the other hand, complement dysfunction, in the absence of autoantibodies may be a trigger of disorders as well. In addition, in this context it applies that, owing to the generic mechanism of the complement system, the disease amenable to treatment by an inhibitor of the complement system, more specifically by an inhibitor of complement component C5 is not particularly limited.

### Treatment

[0009] Eculizumab is a humanized monoclonal antibody targeting C5 and has been approved for PNH treatment. A murine cell line is used for its production. Eculizumab shall not be used in patients with sensitivity against murine proteins. Treatment with eculizumab is very expensive and costs may exceed 600000 EUR per year and patient.

[0010] There therefore remains a need for therapies to treat complement-associated diseases including complement component C5-associated diseases. We, therefore, aim to provide compounds, methods, and pharmaceutical compositions for the treatment of such diseases.

[0011] Double-stranded RNA (dsRNA) able to complementarily bind expressed mRNA has been shown to be able to block gene expression (Fire et al., 1998, Nature. 1998 Feb. 19; 391 (6669):806-1 1 and Elbashir et at., 2001, Nature. 2001 May 24; 41 1 (6836):494-8) by a mechanism that has been termed RNA interference (RNAi). Short dsRNAs direct gene-specific, post-transcriptional silencing in many organisms, including vertebrates, and have become a useful tool for studying gene function. RNAi is mediated by the RNA-induced silencing complex (RISC), a sequence-specific, multi-component nuclease that destroys messenger RNAs homologous to the silencing trigger loaded into the RISC complex. Interfering RNA (IRNA) such as siRNAs, antisense RNA, and micro-RNA are oligonucleotides that prevent the formation of proteins by gene-silencing i.e., inhibiting gene translation of the protein through degradation of mRNA molecules. Gene-silencing agents are becoming increasingly important for therapeutic applications in medicine.

[0012] According to Watts and Corey in the Journal of Pathology (2012; Vol 226, p 365-379) there are algorithms that can be used to design nucleic acid silencing triggers, but all of these have severe limitations. It may take various experimental methods to identify potent siRNAs, as algorithms do not take into account factors such as tertiary structure of the target mRNA or the involvement of RNA binding proteins. Therefore, the discovery of a potent nucleic acid silencing trigger with minimal off-target effects is a complex process. For the pharmaceutical development of these highly charged molecules, it is necessary that they can be synthesised economically, distributed to target tissues, enter cells and function within acceptable limits of toxicity. An aim is to, therefore, provide compounds, methods, and pharmaceutical compositions for the treatment of C5-related diseases as described herein, which comprise oligomeric compounds that modulate, in particular inhibit, gene expression by RNAi.

### SUMMARY

[0013] The aforementioned problem of providing compounds and treatments having the potential of efficiently reducing the effects of C5-related diseases is solved by the present disclosure.

[0014] According to a first aspect, the present disclosure is directed to an oligomeric compound capable of inhibiting expression of complement component C5, wherein the compound comprises at least a first region of linked nucleosides having at least a first nucleobase sequence that is at least partially complementary to at least a portion of RNA transcribed from an C5 gene, wherein the first nucleobase sequence is selected from the following sequences, or a portion thereof: sequences of Table 1a (SEQ ID NOs: 1 to 250), wherein the portion optionally has a length of at least 18 nucleosides.

[0015] Particularly optional embodiments according to the first aspect of the present disclosure relate to optimized hairpin RNAs (referred to as mxRNAs); for further details see the embodiments and their discussion further below.

[0016] Furthermore, and as disclosed further below, the disclosure also relates to double-stranded RNAs (dsRNAs). Deviant from mxRNAs, dsRNAs lack a loop connecting antisense and sense portions and therefore comprise two strands. The two strands are not covalently connected to each other but form a duplex region where base pairing occurs.

[0017] According to a second aspect, the present disclosure is directed to nucleic acid construct comprising at least:
[0018] (a) a first nucleic acid portion that is at least partially complementary to at least a first portion of an RNA, which is transcribed from a C5 gene;
[0019] (b) a second nucleic acid portion that is at least partially complementary to at least a second portion of an RNA, which is transcribed from a C5 gene, the second portion being different from the first portion;
[0020] (c) a third nucleic acid portion that is at least partially complementary to the first nucleic acid portion of (a), so as to form a first nucleic acid duplex region therewith;
[0021] (d) a fourth nucleic acid portion that is at least partially complementary to the second nucleic acid portion of (b), so as to form a second nucleic acid duplex region therewith.

[0022] Optional and/or exemplary features of constructs according to the second aspect of the present disclosure are as follows:
[0023] 1) they contain multiple (2 or more) at least partially double-stranded agents capable of triggering RNA interference, tied together into a single nanostructure predominantly through complementary (Watson-Crick) interactions;
[0024] 2) optionally, other (e.g.) covalent bindings may be used to build the constructs and/or add various ligands (e.g., delivery/targeting moieties such as GalNAc and or other carbohydrates, cholesterol, peptides, or small molecules, optionally attached via linkers);
[0025] 3) the constructs of the disclosure predominantly comprise chemically modified nucleotides (e.g., 2′F, 2′OMe, LNO, PNA, MOE, BNA, PMO, phosphorothioate, phosphorodithioate, etc.), mostly (but not only) to increase resistance to nucleases;
[0026] 4) the constructs contain “fragile” components (e.g. chemical linkers, unmodified nucleotides, etc.), which allow the constructs to disassemble upon exposure to certain biologic environments (e.g. exposure to extra- and/or intra-cellular fluids); particular examples could be (but not limited): a) cleavage of the oligo backbone by nucleases in the sites with non-modified nucleotides; b) cleavage of the chemical linkage due to the change of pH (e.g. in endosomes);
[0027] 5) disassembly upon exposure to the certain biologic environments releases the active components (e.g., the at least partially double-stranded agents capable of triggering RNA interference) to modulate (up- or down-regulate, optionally down-regulate) target gene expression in cells/organisms;
[0028] 6) the constructs can be used to modulate, optionally down-regulate or silence gene expression, to study gene function, or to treat various diseases associated with the target genes to be down regulated.

[0029] According to a third aspect, the present disclosure is directed to a composition comprising an oligomeric compound according to the first aspect and/or a nucleic acid construct according to the second aspect, and a physiologically acceptable excipient.

[0030] According to a fourth aspect, the present disclosure is directed to a pharmaceutical composition comprising an oligomeric compound according to the first aspect and/or a nucleic acid construct according to the second aspect.

[0031] According to a fifth aspect, the present disclosure is directed to an oligomeric compound according to the first aspect and/or a nucleic acid construct according to the second aspect, for use in human or veterinary medicine or therapy.

[0032] According to a sixth aspect, the present disclosure is directed to an oligomeric compound according to the first aspect and/or a nucleic acid construct according to the second aspect, for use in a method of treating a disease or disorder.

[0033] According to a seventh aspect, the present disclosure is directed to a method of treating a disease or disorder comprising administration of an oligomeric compound according to the first aspect and/or a nucleic acid construct according to the second aspect, to an individual in need of treatment.

[0034] According to an eighth aspect, the present disclosure is directed to a use of an oligomeric compound according to the first aspect or according to the second aspect, for use in research as a gene function analysis tool.

[0035] According to a ninth aspect, the present disclosure is directed to a use of an oligomeric compound according to the first aspect or the second aspect in the manufacture of a medicament for a treatment of a disease or disorder.

### Effects Achieved by the Oligomeric Compounds

[0036] Due to the use of the oligomeric compounds according to the present disclosure, a significant reduction of gene expression of complement component C5 in vitro and in vivo is achieved as e.g., shown in the examples disclosed herein. The most inhibiting compounds surprisingly produce knockdowns of up to 70 to 75% C5 mRNA reduction in vitro. Furthermore, large amounts of compounds are also capable of producing knockdowns of 60 to 70% reduction of C5 mRNA in vitro. The significant in vitro activity of these compounds could also be confirmed within in vivo studies disclosed herein. Therefore, the oligomeric compounds of the present disclosure are suitable candidates for the treatment of C5-related diseases.

[0037] Furthermore, it was surprisingly found that, in certain embodiments, the mentioned effects are achieved by using oligomeric compounds according to the present disclosure for inhibiting the expression of C5 in the form of shRNA constructs having a reduced length of e.g., 33 nucleosides (also called “mxRNA”) compared to conventional shRNA molecules having greater lengths. This can e.g., make a synthesis of shRNA molecules more efficient, because less units are needed.

[0038] For certain oligomeric compounds according to the present disclosure, being in the form of shRNA constructs for inhibiting the expression of C5, it was surprisingly found out that the aforementioned effects can be achieved by using short sense strands within the shRNA having a length of optionally 14 nucleosides which is shorter than the length of the sense strands in conventional shRNA molecules.

[0039] Due to their successful C5 knockdown of the inventive compounds in their mxRNA form it is also plausible that they are functioning, the same way as a part of muRNA constructs as disclosed herein. This is in particular because, without wishing to be bound by a particular theory, it is assumed that the active species are the same.

### BRIEF DESCRIPTION OF THE FIGURES

[0040] FIG. 1 shows single dose curves of certain C5 mxRNA compounds of the present disclosure and their activity in inhibiting C5 gene expression (primary screening).

[0041] FIG. 2 shows dose curves of 25 C5 mxRNA compounds and their activity in inhibiting C5 gene expression (secondary screening).

[0042] FIG. 3 shows dose curves of C5 mxRNA lead compounds for preparation in vivo and their dose curves.

[0043] FIG. 4 shows a study schedule and study information for a study relating to C5 targeting mxRNA leads for candidate dose and duration response study in humanized liver-uPA-SCID mice (PXB) model.

[0044] FIG. 5 shows results of the C5 targeting mxRNA construct study for dose and duration response in humanized liver-uPA-SCID mice (PXB).

[0045] FIG. 6 shows a study schedule and study information for a study relating to an evaluation of a duration effect of human complement C5 targeting mxRNA, in the humanized liver-uPA-SCID mouse model.

[0046] FIG. 7 shows results of the study of an evaluation of a duration effect of human complement C5 targeting mxRNA, in the humanized liver-uPA-SCID mouse model.

### DETAILED DESCRIPTION AND EMBODIMENTS

[0047] Further embodiments (items) of the present disclosure are described below by way of example only. These examples represent the best ways of putting the disclosure into practice that are currently known to the applicant although they are not the only ways in which this could be achieved.

[0048] It will be understood that the benefits and advantages described herein may relate to one embodiment or may relate to several embodiments. The embodiments are not limited to those that solve any or all of the stated problems or those that have any or all of the stated benefits and advantages. Embodiments labelled “optional” or “optionally” are not intended to limit the scope of the claims but to show optional embodiments of the present disclosure.

[0049] Features of different aspects and embodiments of the disclosure may be combined as appropriate, as would be apparent to a skilled person, and may be combined with any of the aspects of the disclosure.

### Definitions

[0050] The following definitions pertain to the disclosure throughout. In many instances, the definitions, in addition to the respective definition as such, provide non-exhaustive listings of possible implementations, which amount to optional embodiments.

[0051] Unless specific definitions are provided, the nomenclature used in connection with, and the procedures and techniques of, analytical chemistry, synthetic organic chemistry, and medicinal and pharmaceutical chemistry described herein are those well-known and commonly used in the art. Standard techniques may be used for chemical synthesis, and chemical analysis. Certain such techniques and procedures may be found for example in “Carbohydrate Modifications in Antisense Research” Edited by Sangvi and Cook, American Chemical Society, Washington D.C., 1994; “Remington's Pharmaceutical Sciences,” Mack Publishing Co., Easton, Pa., 21st edition, 2005; and “Antisense Drug Technology, Principles, Strategies, and Applications” Edited by Stanley T. Crooke, CRC Press, Boca Raton, Florida; and Sambrook ct al., “Molecular Cloning, A laboratory Manual,” 2nd Edition, Cold Spring Harbor Laboratory Press, 1989, which are hereby incorporated by reference for any purpose. Where permitted, all patents, applications, published applications and other publications and other data referred to throughout in the disclosure are incorporated by reference herein in their entirety.

[0052] Unless otherwise indicated, the following terms have the following meanings:

[0053] As used herein, “excipient” means any compound or mixture of compounds that is added to a composition as provided herein that is suitable for delivery of an oligomeric compound.

[0054] As used herein, “nucleoside” means a compound comprising a nucleobase moiety and a sugar moiety. Nucleosides include, but are not limited to, naturally occurring nucleosides (as found in DNA and RNA) and modified nucleosides. Nucleosides may be linked to a phosphate moiety, phosphate-linked nucleosides also being referred to as “nucleotides”. The structural features and/or the lengths of oligomeric compounds or nucleic acid constructs disclosed herein is expressed in terms of “nucleosides” or “nucleotides”.

[0055] As used herein, “chemical modification” or “chemically modified” means a chemical difference in a compound when compared to a naturally occurring counterpart. Chemical modifications of oligonucleotides include nucleoside modifications (including sugar moiety modifications and nucleobase modifications) and internucleoside linkage modifications. In reference to an oligonucleotide, chemical modification does not include differences only in nucleobase sequence.

[0056] As used herein, “furanosyl” means a structure comprising a 5-membered ring comprising four carbon atoms and one oxygen atom.

[0057] As used herein, “naturally occurring sugar moiety” means a ribofuranosyl as found in naturally occurring RNA or a deoxyribofuranosyl as found in naturally occurring DNA. A “naturally occurring sugar moiety” as referred to herein is also termed as an “unmodified sugar moiety”. In particular, such a “naturally occurring sugar moiety” or an “unmodified sugar moiety” as referred to herein has a —H (DNA sugar moiety) or —OH (RNA sugar moiety) at the 2′-position of the sugar moiety, especially a —H (DNA sugar moiety) at the 2′-position of the sugar moiety.

[0058] As used herein, “sugar moiety” means a naturally occurring sugar moiety or a modified sugar moiety of a nucleoside. As used herein, “modified sugar moiety,” means a substituted sugar moiety or a sugar surrogate.

[0059] As used herein, “substituted sugar moiety” means a furanosyl that has been substituted. Substituted sugar moieties include, but are not limited to, furanosyls comprising substituents at the 2′-position, the 3′-position, the 5′-position and/or the 4′-position. Certain substituted sugar moieties are bicyclic sugar moieties.

[0060] As used herein, “2′-substituted sugar moiety” means a furanosyl comprising a substituent at the 2′-position other than H or OH. Unless otherwise indicated, a 2′-substituted sugar moiety is not a bicyclic sugar moiety (i.e., the 2′-substituent of a 2′-substituted sugar moiety does not form a bridge to another atom of the furanosyl ring).

[0061] As used herein, “MOE” means —OCH2CH2OCH3.

[0062] As used herein, “2′-F nucleoside” refers to a nucleoside comprising a sugar comprising fluorine at the 2′ position. Unless otherwise indicated, the fluorine in a 2′-F nucleoside is in the ribo position (replacing the OH of a natural ribose). Duplexes of uniformly modified 2′-fluorinated (ribo) oligonucleotides hybridized to RNA strands are not RNase H substrates while the analogues retain RNase H activity.

[0063] As used herein the term “sugar surrogate” means a structure that does not comprise a furanosyl and that is capable of replacing the naturally occurring sugar moiety of a nucleoside, such that the resulting nucleoside sub-units are capable of linking together and/or linking to other nucleosides to form an oligomeric compound which is capable of hybridizing to a complementary oligomeric compound. Such structures include rings comprising a different number of atoms than furanosyl (e.g., 4, 6, or 7-membered rings); replacement of the oxygen of a furanosyl with a non-oxygen atom (e.g., carbon, sulfur, or nitrogen); or both a change in the number of atoms and a replacement of the oxygen. Such structures may also comprise substitutions corresponding to those described for substituted sugar moieties (e.g., 6-membered carbocyclic bicyclic sugar surrogates optionally comprising additional substituents). Sugar surrogates also include more complex sugar replacements (e.g., the non-ring systems of peptide nucleic acid). Sugar surrogates include without limitation morpholinos, cyclohexenyls and cyclohexitols.

[0064] As used herein, “bicyclic sugar moiety” means a modified sugar moiety comprising a 4 to 7 membered ring (including but not limited to a furanosyl) comprising a bridge connecting two atoms of the 4 to 7 membered ring to form a second ring, resulting in a bicyclic structure. In certain embodiments, the 4 to 7 membered ring is a sugar ring. In certain embodiments, the 4 to 7 membered ring is a furanosyl. In certain such embodiments, the bridge connects the 2′-carbon and the 4′-carbon of the furanosyl.

[0065] As used herein, “nucleotide” means a nucleoside further comprising a phosphate linking group. As used herein, “linked nucleosides” may or may not be linked by phosphate linkages and thus includes, but is not limited to, “linked nucleotides.” As used herein, “linked nucleosides” are nucleosides that are connected in a continuous sequence (i.e., no additional nucleosides are present between those that are linked).

[0066] As used herein, “nucleobase” means a group of atoms that can be linked to a sugar moiety to create a nucleoside that is capable of incorporation into an oligonucleotide, and wherein the group of atoms is capable of bonding, more specifically hydrogen bonding, with a complementary naturally occurring nucleobase of another oligonucleotide or nucleic acid. Nucleobases may be naturally occurring or may be modified.

[0067] As used herein the terms, “unmodified nucleobase” or “naturally occurring nucleobase” means the naturally occurring heterocyclic nucleobases of RNA or DNA: the purine bases adenine (A) and guanine (G), and the pyrimidine bases thymine (T), cytosine (C) (including 5-methyl C), and uracil (U).

[0068] As used herein, “modified nucleobase,” means any nucleobase that is not a naturally occurring nucleobase.

[0069] As used herein, “modified nucleoside” means a nucleoside comprising at least one chemical modification compared to naturally occurring RNA or DNA nucleosides. Modified nucleosides can comprise a modified sugar moiety and/or a modified nucleobase.

[0070] As used herein, “bicyclic nucleoside” or “BNA” means a nucleoside comprising a bicyclic sugar moiety.

[0071] As used herein, “locked nucleic acid nucleoside” or “LNA” means a nucleoside comprising a bicyclic sugar moiety comprising a 4′-CH2-O-2′bridge.

[0072] As used herein, “2′-substituted nucleoside” means a nucleoside comprising a substituent at the 2′-position of the sugar moiety other than H or OH. Unless otherwise indicated, a 2′-substituted nucleoside is not a bicyclic nucleoside.

[0073] As used herein, “deoxynucleoside” means a nucleoside comprising 2′-H furanosyl sugar moiety, as found in naturally occurring deoxyribonucleosides (DNA). In certain embodiments, a 2′-deoxynucleoside comprises a modified nucleobase or comprises an RNA nucleobase (e.g., uracil).

[0074] As used herein, “oligonucleotide” means a compound comprising a plurality of linked nucleosides. In certain embodiments, an oligonucleotide comprises one or more unmodified ribonucleosides (RNA) and/or unmodified deoxyribonucleosides (DNA) and/or one or more modified nucleosides.

[0075] As used herein, “modified oligonucleotide” means an oligonucleotide comprising at least one modified nucleoside and/or at least one modified internucleoside linkage.

[0076] Optional modified internucleoside linkages are those, which confer increased stability as compared to the naturally occurring phosphodiesters. “Stability” refers in particular to stability against hydrolysis including enzyme-catalyzed hydrolysis, enzymes including exonucleases and endonucleases.

[0077] Optional positions for such modified internucleoside linkages include the termini and the hairpin loop of single-stranded oligomeric compounds of the disclosure. For example, the internucleoside linkages connecting first and second nucleoside and second and third nucleoside counting from the 5′ terminus, and/or the internucleoside linkages connecting first and second nucleoside and second and third nucleoside counting from the 3′ terminus are modified. In addition, a linkage connecting the terminal nucleoside of the 3′ terminus with a ligand, such as GalNAc, may be modified.

[0078] As discussed above, optional positions are in the hairpin loop of the single-stranded oligomeric compounds. In particular, all linkages, all but one linkage or the majority of linkages in the hairpin loop are modified. As used herein, “linkages in the hairpin loop” designates the linkages between nucleosides, which are not engaged in base pairing. For example, in a hairpin loop consisting of five nucleosides, there are four linkages between nucleosides which are not engaged in base pairing. Optionally, the term “linkages in the hairpin loop” also extends to the linkages connecting the stem to the loop, i.e., those linkages which connect a base-paired nucleoside to a non-based paired nucleoside. Generally, there are two such positions in hairpins and mxRNAs in accordance with the disclosure.

[0079] Most optional is that modified internucleoside linkages are at both termini and in the hairpin loop.

[0080] As used herein, “linkage” or “linking group” means a group of atoms that link together two or more other groups of atoms.

[0081] As used herein “internucleoside linkage” means a covalent linkage between adjacent nucleosides in an oligonucleotide.

[0082] As used herein “naturally occurring internucleoside linkage” means a 3′ to 5′ phosphodiester linkage.

[0083] As used herein, “modified internucleoside linkage,” means any internucleoside linkage other than a naturally occurring internucleoside linkage. In particular, a “modified internucleoside linkage” as referred to herein can include a modified phosphorous linking group such as a phosphorothioate or phosphorodithioate internucleoside linkage.

[0084] As used herein, “terminal internucleoside linkage” means the linkage between the last two nucleosides of an oligonucleotide or defined region thereof.

[0085] As used herein, “phosphorus linking group” means a linking group comprising a phosphorus atom and can include naturally occurring phosphorous linking groups as present in naturally occurring RNA or DNA, such as phosphodiester linking groups, or modified phosphorous linking groups that are not generally present in naturally occurring RNA or DNA, such as phosphorothioate or phosphorodithioate linking groups. Phosphorus linking groups can therefore include without limitation, phosphodiester, phosphorothioate, phosphorodithioate, phosphonate, methylphosphonate, phosphoramidate, phosphorothioamidate, thionoalkylphosphonate, phosphotriesters, thionoalkylphosphotriester and boranophosphate.

[0086] As used herein, “internucleoside phosphorus linking group” means a phosphorus linking group that directly links two nucleosides.

[0087] As used herein, “oligomeric compound” means a polymeric structure comprising two or more substructures. In certain embodiments, an oligomeric compound comprises an oligonucleotide, such as a modified oligonucleotide. In certain embodiments, an oligomeric compound further comprises one or more conjugate groups and/or terminal groups and/or ligands. In certain embodiments, an oligomeric compound consists of an oligonucleotide. In certain embodiments, an oligomeric compound comprises a backbone of one or more linked monomeric sugar moieties, where each linked monomeric sugar moiety is directly or indirectly attached to a heterocyclic base moiety. In certain embodiments, oligomeric compounds may also include monomeric sugar moieties that are not linked to a heterocyclic base moiety, thereby providing abasic sites. Oligomeric compounds may be defined in terms of a nucleobase sequence only, i.e., by specifying the sequence of A, G, C, U (or T). In such a case, the structure of the sugar-phosphate backbone is not particularly limited and may or may not comprise modified sugars and/or modified phosphates. On the other hand, oligomeric compounds may be more comprehensively defined, i.e., by specifying not only the nucleobase sequence, but also the structure of the backbone, in particular the modification status of the sugars (unmodified, 2′-OMe modified, 2′-F modified etc.) and/or of the phosphates. An mxRNA is one non-limiting example for an oligomeric compound.

[0088] As used herein, “nucleic acid construct” or “construct” refers to an assembly of two or more, such as four oligomeric compounds. The oligomeric compounds may be connected to each other by covalent bonds such phosphodiester bonds as they occur in naturally occurring nucleic acids or modified versions thereof as disclosed herein, or by non-covalent bonds such as hydrogen bonds, optionally hydrogen bonds between nucleobases such as Watson-Crick base pairing. In certain embodiments, optional is that a construct comprises four oligomeric compounds, two of which are connected covalently, thereby giving rise to two nucleic acid strands which nucleic acid strands are bound to each other by hydrogen bonds. Complementarity between the strand may be throughout, but is not necessarily so. In particular, exemplary embodiments provide for an antisense strand targeting a first region of C5 mRNA to be connected covalently with a sense strand of another C5-targeting double stranded RNA molecule, and of the antisense strand of the C5 mRNA-targeting double stranded RNA molecule to be connected covalently to a sense strand of the other C5 mRNA-targeting double stranded RNA molecule. Since antisense and sense strands of the parent single-target-directed RNA molecules do not need to have the same length and optionally do not have the same length with antisense portions being longer than sense portions, an optional construct of the disclosure contains a central region where the 3′ regions of the antisense portions of the parent single-target-directed RNA molecules face each other. In that region generally no or only partial base pairing will occur, while full complementarity is not excluded. Otherwise, where antisense and sense portions of the respective parent RNA molecules face each other; there is complementarity, optionally full complementarity or 1 or 2 mismatches. An muRNA is non-limiting example for a nucleic acid construct.

[0089] The term “strand” has its art-established meaning and refers to a plurality of linked nucleosides, the linker not being particularly limited, but including phosphodiesters and variants thereof as disclosed herein. A strand may also be viewed as a plurality of linked nucleotides in which case the linker would be a covalent bond.

[0090] As used herein, “terminal group” means one or more atom attached to either, or both, the 3′ end or the 5′ end, also called “terminus” of an oligonucleotide. In certain embodiments, a terminal group comprises one or more terminal group nucleosides, whereas a “terminal nucleoside” is only one nucleotide at the respective end (5′ end or 3′ end).

[0091] As used herein, “conjugate” or “conjugate group” means an atom or group of atoms bound to an oligonucleotide or oligomeric compound. In certain embodiments, a conjugate group links a ligand to a modified oligonucleotide or oligomeric compound. In general, conjugate groups can modify one or more properties of the compound to which they are attached, including, but not limited to pharmacodynamic, pharmacokinetic, binding, absorption, cellular distribution, cellular uptake, and charge and/or clearance properties.

[0092] As used herein, “conjugate linker” or “linker” in the context of a conjugate group means a portion of a conjugate group comprising any atom or group of atoms and which covalently link an oligonucleotide to another portion of the conjugate group. In certain embodiments, the point of attachment on the oligomeric compound is the 3′-oxygen atom of the 3′-hydroxyl group of the 3′ terminal nucleoside of the oligonucleotide. In certain embodiments, the point of attachment on the oligomeric compound is the 5′-oxygen atom of the 5′-hydroxyl group of the 5′ terminal nucleoside of the oligonucleotide. In certain embodiments, the bond for forming attachment to the oligomeric compound is a cleavable bond. In certain such embodiments, such cleavable bond constitutes all or part of a cleavable moiety.

[0093] In certain embodiments, conjugate groups comprise a cleavable moiety (e.g., a cleavable bond or cleavable nucleoside) and ligand portion that can comprise one or more ligands, such as a carbohydrate cluster portion, such as an N-Acetyl-Galactosamine, also referred to as “GalNAc”, cluster portion. In certain embodiments, the carbohydrate cluster portion is identified by the number and identity of the ligand. For example, in certain embodiments, the carbohydrate cluster portion comprises 2 GalNAc groups. For example, in certain embodiments, the carbohydrate cluster portion comprises 3 GalNAc groups and this is particularly optional. In certain embodiments, the carbohydrate cluster portion comprises 4 GalNAc groups. Such ligand portions are attached to an oligomeric compound via a cleavable moiety, such as a cleavable bond or cleavable nucleoside. The ligands can be arranged in a linear or branched configuration, such as a biantennary or triantennary configurations. An optional carbohydrate cluster has the following formula:

[chemical structure]

wherein in the structural formula one, two, or three phosphodiester linkages can also be substituted by phosphorothioate linkages.

[0094] As used herein, “cleavable moiety” means a bond or group that is capable of being cleaved under physiological conditions. In certain embodiments, a cleavable moiety is cleaved inside a cell or sub-cellular compartments, such as an endosome or lysosome. In certain embodiments, a cleavable moiety is cleaved by endogenous enzymes, such as nucleases. In certain embodiments, a cleavable moiety comprises a group of atoms having one, two, three, four, or more than four cleavable bonds. In certain embodiments, a cleavable moiety is a phosphodiester linkage.

[0095] As used herein, “cleavable bond” means any chemical bond capable of being broken.

[0096] As used herein, “carbohydrate cluster” means a compound having one or more carbohydrate residues attached to a linker group.

[0097] As used herein, “modified carbohydrate” means any carbohydrate having one or more chemical modifications relative to naturally occurring carbohydrates.

[0098] As used herein, “carbohydrate derivative” means any compound which may be synthesized using a carbohydrate as a starting material or intermediate.

[0099] As used herein, “carbohydrate” means a naturally occurring carbohydrate, a modified carbohydrate, or a carbohydrate derivative. A carbohydrate is a biomolecule including carbon (C), hydrogen (H) and oxygen (O) atoms. Carbohydrates can include monosaccharide, disaccharides, trisaccharides, tetrasaccharides, oligosaccharides or polysaccharides, such as one or more galactose moieties, one or more lactose moieties, one or more N-Acetyl-Galactosamine moieties, and/or one or more mannose moieties. A particularly optional carbohydrate is N-Acetyl-Galactosamine.

[0100] As used herein, “strand” means an oligomeric compound comprising linked nucleosides.

[0101] As used herein, “single strand” or “single-stranded” means an oligomeric compound comprising linked nucleosides that are connected in a continuous sequence without a break there between. Such single strands may include regions of sufficient self-complementarity so as to be capable of forming a stable self-duplex in a hairpin structure.

[0102] As used herein, “hairpin” means a single stranded oligomeric compound that includes a duplex formed by base pairing between sequences in the strand that are self-complementary and opposite in directionality.

[0103] As used herein, “hairpin loop” means an unpaired loop of linked nucleosides in a hairpin that is created as a result of hybridization of the self-complementary sequences. The resulting structure looks like a loop or a U-shape.

[0104] In particular, short hairpin RNA, also denoted as shRNA, comprises a duplex region and a loop connecting the regions forming the duplex. The end of the duplex region, which does not carry the loop, may be blunt-ended or carry (a) 3′ and/or (a) 5′ overhang(s). Optional are blunt-ended constructs. The term “shRNA” is more generic than “mxRNA”, as defined below, and may include compounds in which the loop is not or not exclusively formed out of an antisense strand. In particular, shRNA includes an antisense strand, also called guide strand, being complementary to a region of a target RNA, and a sense strand, i.e., a passenger strand, being substantially complementary to the antisense strand. More particularly, the antisense strand and the sense strand within the shRNA are directly linked, e.g., by a phosphate or a phosphorothioate, or linked by a third portion of linked nucleosides forming the loop, which means that the 3′ end of the antisense strand is linked to the 5′ end of the sense strand via covalent bonding over several other groups. Such direct linkage does not include a gap or nick.

[0105] As used herein, “directionality” means the end-to-end chemical orientation of an oligonucleotide based on the chemical convention of numbering of carbon atoms in the sugar moiety meaning that there will be a 5′-end defined by the 5′ carbon of the sugar moiety, and a 3′-end defined by the 3′ carbon of the sugar moiety. In a duplex or double stranded oligonucleotide, the respective strands run in opposite 5′ to 3′ directions to permit base pairing between them.

[0106] As used herein, “duplex”, or also abbreviated as “dup”, means two or more complementary strand regions, or strands, of an oligonucleotide or oligonucleotides, hybridized together by way of non-covalent, sequence-specific interaction there between. Most commonly, the hybridization in the duplex will be between nucleobases adenine (A) and thymine (T), and/or (A) adenine and uracil (U), and/or guanine (G) and cytosine (C). The duplex may be part of a single stranded structure, wherein self-complementarity leads to hybridization, or as a result of hybridization between respective strands in a double stranded construct.

[0107] As used herein, “double strand” or “double stranded” means a pair of oligomeric compounds that are hybridized to one another. In certain embodiments, a double-stranded oligomeric compound comprises a first and a second oligomeric compound.

[0108] As used herein, “expression” means the process by which a gene ultimately results in a protein. Expression includes, but is not limited to, transcription, post-transcriptional modification (e.g., splicing, polyadenylation, addition of 5′-cap), and translation.

[0109] As used herein, “transcription” or “transcribed” refers to the first of several steps of DNA based gene expression in which a target sequence of DNA is copied into RNA (especially mRNA) by the enzyme RNA polymerase. During transcription, a DNA sequence is read by an RNA polymerase, which produces a complementary, antiparallel RNA sequence called a primary transcript.

[0110] As used herein, “target sequence” means a sequence to which an oligomeric compound is intended to hybridize to result in a desired activity with respect to C5 expression. Oligonucleotides have sufficient complementarity to their target sequences to allow hybridization under physiological conditions.

[0111] As used herein, “nucleobase complementarity” or “complementarity” when in reference to nucleobases means a nucleobase that is capable of base pairing with another nucleobase. For example, in DNA, adenine (A) is complementary to thymine (T). For example, in RNA, adenine (A) is complementary to uracil (U). In both DNA and RNA, guanine (G) is complementary to cytosine (C). In certain embodiments, complementary nucleobase means a nucleobase of an oligomeric compound that is capable of base pairing with a nucleobase of its target sequence. For example, if a nucleobase at a certain position of an oligomeric compound is capable of hydrogen bonding with a nucleobase at a certain position of a target sequence, then the position of hydrogen bonding between the oligomeric compound and the target sequence is considered complementary at that nucleobase pair. Nucleobases comprising certain modifications may maintain the ability to pair with a counterpart nucleobase and thus, are still capable of nucleobase complementarity.

[0112] As used herein, “non-complementary” in reference to nucleobases means a pair of nucleobases that do not form hydrogen bonds with one another.

[0113] As used herein, “complementary” in reference to oligomeric compounds (e.g., linked nucleosides, oligonucleotides) means the capacity of such oligomeric compounds or regions thereof to hybridize to a target sequence, or to a region of the oligomeric compound itself, through nucleobase complementarity.

[0114] Complementary oligomeric compounds need not have nucleobase complementarity at each nucleoside. Rather, some mismatches are tolerated. In certain embodiments, complementary oligomeric compounds or regions are complementary at 70% of the nucleobases (70% complementary). In certain embodiments, complementary oligomeric compounds or regions are 80%>complementary. In certain embodiments, complementary oligomeric compounds or regions are 90%> complementary. In certain embodiments, complementary oligomeric compounds or regions are at least 95% complementary. In certain embodiments, complementary oligomeric compounds or regions are 100% complementary.

[0115] As used herein, “self-complementarity” in reference to oligomeric compounds means a compound that may fold back on itself, creating a duplex as a result of nucleobase hybridization of internal complementary strand regions. Depending on how close together and/or how long the strand regions are, then the compound may form hairpin loops, junctions, bulges or internal loops.

[0116] As used herein, “mismatch” means a nucleobase of an oligomeric compound that is not capable of pairing with a nucleobase at a corresponding position of a target sequence, or at a corresponding position of the oligomeric compound itself when the oligomeric compound hybridizes as a result of self-complementarity, when the oligomeric compound and the target sequence and/or self-complementary regions of the oligomeric compound, are aligned.

[0117] As used herein, “hybridization” means the pairing of complementary oligomeric compounds (e.g., an oligomeric compound and its target sequence). While not limited to a particular mechanism, the most common mechanism of pairing involves hydrogen bonding, which may be Watson-Crick, Hoogsteen or reversed Hoogsteen hydrogen bonding, between complementary nucleobases.

[0118] As used herein, “specifically hybridizes” means the ability of an oligomeric compound to hybridize to one nucleic acid site with greater affinity than it hybridizes to another nucleic acid site.

[0119] As used herein, “fully complementary” in reference to an oligomeric compound or region thereof means that each nucleobase of the oligomeric compound or region thereof is capable of pairing with a nucleobase of a complementary nucleic acid target sequence or a self-complementary region of the oligomeric compound. Thus, a fully complementary oligomeric compound or region thereof comprises no mismatches or unhybridized nucleobases with respect to its target sequence or a self-complementary region of the oligomeric compound.

[0120] As used herein, “percent complementarity” means the percentage of nucleobases of an oligomeric compound that are complementary to an equal-length portion of a target nucleic acid. Percent complementarity is calculated by dividing the number of nucleobases of the oligomeric compound that are complementary to nucleobases at corresponding positions in the target nucleic acid by the total length of the oligomeric compound.

[0121] As used herein, “percent identity” means the number of nucleobases in a first nucleic acid that are the same type (independent of chemical modification) as nucleobases at corresponding positions in a second nucleic acid, divided by the total number of nucleobases in the first nucleic acid.

[0122] As used herein, “modulation” means a change of amount or quality of a molecule, function, or activity when compared to the amount or quality of a molecule, function, or activity prior to modulation. For example, modulation includes the change, either an increase (stimulation or induction) or a decrease (inhibition or reduction) in gene expression.

[0123] As used herein, “type of modification” in reference to a nucleoside or a nucleoside of a “type” means the chemical modification of a nucleoside and includes modified and unmodified nucleosides. Accordingly, unless otherwise indicated, a “nucleoside having a modification of a first type” may be an unmodified nucleoside.

[0124] As used herein, “differently modified” mean chemical modifications or chemical substituents that are different from one another, including absence of modifications. Thus, for example, an MOE nucleoside and an unmodified naturally occurring RNA nucleoside are “differently modified,” even though the naturally occurring nucleoside is unmodified. Likewise, DNA and RNA oligonucleotides are “differently modified,” even though both are naturally occurring unmodified nucleosides. Nucleosides that are the same but for comprising different nucleobases are not differently modified. For example, a nucleoside comprising a 2′-OMe modified sugar moiety and an unmodified adenine nucleobase and a nucleoside comprising a 2′-OMe modified sugar moiety and an unmodified thymine nucleobase are not differently modified.

[0125] As used herein, “the same type of modifications” refers to modifications that are the same as one another, including absence of modifications. Thus, for example, two unmodified RNA nucleosides have “the same type of modification,” even though the RNA nucleosides are unmodified. Such nucleosides having the same type of modification comprises different nucleobases.

[0126] As used herein, “region” or “regions”, or “portion” or “portions”, mean a plurality of linked nucleosides that have a function or character as defined herein, in particular with reference to the claims and definitions as provided herein. Typically, such regions or portions comprise at least 10, at least 11, at least 12 or at least 13 linked nucleosides. For example, such regions comprise 13 to 20 linked nucleosides, such as 13 to 16 or 18 to 20 linked nucleosides. Typically, a first region as defined herein comprises 18 to 20 nucleosides and a second region as defined herein comprises 13 to 16 linked nucleosides.

[0127] As used herein, “pharmaceutically acceptable carrier or diluent” means any substance suitable for use in administering to an animal. In certain embodiments, a pharmaceutically acceptable carrier or diluent is sterile saline. In certain embodiments, such sterile saline is pharmaceutical grade saline.

[0128] As used herein, “substituent” and “substituent group,” means an atom or group that replaces the atom or group of a named parent compound. For example, a substituent of a modified nucleoside is any atom or group that differs from the atom or group found in a naturally occurring nucleoside (e.g., a modified 2′-substituent is any atom or group at the 2′-position of a nucleoside other than H or OH). Substituent groups can be protected or unprotected. In certain embodiments, compounds of the present disclosure have substituents at one or at more than one position of the parent compound. Substituents may also be further substituted with other substituent groups and may be attached directly or via a linking group such as oxygen or an alkyl or hydrocarbyl group to a parent compound.

[0129] Such substituents can be present as the modification on the sugar moiety, in particular a substituent present at the 2′-position of the sugar moiety. Unless otherwise indicated, groups amenable for use as substituents include without limitation, one or more of halo, hydroxyl, alkyl, alkenyl, alkynyl, acyl, carboxyl, alkoxy, alkoxyalkylene and amino substituents. Certain substituents as described herein can represent modifications directly attached to a ring of a sugar moiety (such as a halo, such as fluoro, directly attached to a sugar ring), or a modification indirectly linked to a ring of a sugar moiety by way of an oxygen linking atom that itself is directly linked to the sugar moiety (such as an alkoxyalkylene, such as methoxyethylene, linked to an oxygen atom, overall providing an MOE substituent as described herein attached to the 2′-position of the sugar moiety).

[0130] As used herein, “alkyl,” as used herein, means a saturated straight or branched monovalent C1-6 hydrocarbon radical, with methyl being a most optional alkyl as a substituent at the 2′-position of the sugar moiety. The alkyl group typically attaches to an oxygen linking atom at the 2′position of the sugar, therefore, overall providing a —Oalkyl substituent, such as an —OCH3 substituent, on a sugar moiety of an oligomeric compound according to the present disclosure. This will be well understood be a person skilled in the art.

[0131] As used herein, “alkylene” means a saturated straight or branched divalent hydrocarbon radical of the general formula —CnH2n- where n is 1-6. Methylene or ethylene are optional alkylenes.

[0132] As used herein, “alkenyl” means a straight or branched unsaturated monovalent C2-6 hydrocarbon radical, with ethenyl or propenyl being most optional alkenyls as a substituent at the 2′-position of the sugar moiety. As will be well understood in the art, the degree of unsaturation that is present in an alkenyl radical is the presence of at least one carbon to carbon double bond. The alkenyl group typically attaches to an oxygen linking atom at the 2′-position of the sugar, therefore, overall providing a —Oalkenyl substituent, such as an —OCH2CH═CH2 substituent, on a sugar moiety of an oligomeric compound according to the present disclosure. This will be well understood be a person skilled in the art.

[0133] As used herein, “alkynyl” means a straight or branched unsaturated C2-6 hydrocarbon radical, with ethynyl being a most optional alkynyl as a substituent at the 2′-position of the sugar moiety. As will be well understood in the art, the degree of unsaturation that is present in an alkynyl radical is the presence of at least one carbon to carbon triple bond. The alkynyl group typically attaches to an oxygen linking atom at the 2′-position of the sugar, therefore, overall providing a —Oalkynyl substituent on a sugar moiety of an oligomeric compound according to the present disclosure. This will be well understood be a person skilled in the art.

[0134] As used herein, “carboxyl” is a radical having a general formula —CO2H.

[0135] As used herein, “acyl” means a radical formed by removal of a hydroxyl group from a carboxyl radical as defined herein and has the general Formula —C(O)—X where X is typically C1-6 alkyl.

[0136] As used herein, “alkoxy” means a radical formed between an alkyl group, such as a C1-6 alkyl group, and an oxygen atom wherein the oxygen atom is used to attach the alkoxy group either to a parent molecule (such as at the 2′-position of a sugar moiety), or to another group such as an alkylene group as defined herein. Examples of alkoxy groups include without limitation, methoxy, ethoxy, propoxy, isopropoxy, n-butoxy, sec-butoxy and tert-butoxy. Alkoxy groups as used herein may optionally include further substituent groups.

[0137] As used herein, alkoxyalkylene means an alkoxy group as defined herein that is attached to an alkylene group also as defined herein, and wherein the oxygen atom of the alkoxy group attaches to the alkylene group and the alkylene attaches to a parent molecule. The alkylene group typically attaches to an oxygen linking atom at the 2′-position of the sugar, therefore, overall providing a —Oalkylenealkoxy substituent, such as an —OCH2CH2OCH3 substituent, on a sugar moiety of an oligomeric compound according to the present disclosure. This will be well understood by a person skilled in the art and is generally referred to as an MOE substituent as defined herein and as known in the art.

[0138] As used herein, “amino” includes primary, secondary and tertiary amino groups.

[0139] As used herein, “halo” and “halogen,” mean an atom selected from fluorine, chlorine, bromine and iodine.

[0140] As used herein, the term “mxRNA” is in particular understood as defined in WO 2020/044186 A2, which is incorporated by reference herein in its entirety. In particular, an mxRNA is a hairpin-shaped RNA molecule consisting of an antisense portion (also referred to as the guide strand) and a sense portion (also referred to the passenger strand). The mxRNA comprises duplex region and a hairpin loop, wherein the mxRNA has an approximate length of about 34 nucleotides. The duplex region comprises a region in which parts of the antisense portion and substantially the entire sense portion, typically 14 or 15 nucleotides of each strand, are base-paired. The hairpin loop connects both regions, i.e., antisense region and sense region, of that duplex via e.g. a phosphate or a phosphorothioate linker, i.e. covalently, while the antisense portion typically has a length of about 18 to 20 nucleotides and, therefore, forms the antisense duplex region and the loop. The loop, of which the antisense portion is part, furthermore connects the sense, forming the second strand of the loop, and the antisense portion.

[0141] The term “angiotensinogen” or abbreviated “AGT”, also known as SERPINA 8 or ANHU, is used in its common sense and denotes a protein produced in the liver which is a component of the renin-angiotensin-aldosterone-system (RAAS), and which is converted to angiotensin I by renin when released in circulation. Angiotensinogen is expressed and produced in the liver by the angiotensin gene or “AGT gene”.

[0142] As used herein, the term “muRNA” or “multi RNA” includes nucleic acid constructs comprising more than one, typically two, RNA sequences, i.e., first and second nucleic acid portions, targeting different regions of C5 mRNA; or one region of C5 mRNA and an mRNA region of another target molecule. The targeting RNA sequences are also referred to as “antisense” or “guide” strands, while the respective passenger strands, i.e., third and fourth nucleic acid portions being complementary to the first and second portion, respectively, are also included in the nucleic acid construct. In particular, such muRNA are designed such that subsequent to in vivo administration, they are disassembled and the first and second nucleic acid portions are released. A particular example for such muRNA is shown below, where (1) is the first nucleic acid portion, (2) is the third nucleic acid portion being complementary to (1), (3) is the second nucleic acid portion being complementary to the fourth nucleic acid portion, while (5) is a labile linker while (6) is a ligand, which will both be explained below.

[chemical structure]

[0143] It will also be understood that oligomeric compounds as described herein may have one or more non-hybridizing nucleosides at one or both ends of one or both strands (overhangs) and/or one or more internal non-hybridizing nucleosides (mismatches) provided there is sufficient complementarity to maintain hybridization under physiologically relevant conditions. Alternatively, oligomeric compounds as described herein may be blunt ended at least one end.

[0144] As used herein, the term “complement component C5” or just “C5” denotes the corresponding and commonly known protein, which decomposes into C5a and C5b, wherein C5b forms part of the membrane attack complex at the late stage of the complement activation. C5 is a protein that is in humans encoded by the C5 gene. Complement component C5 is the fifth component of complement, which plays an important role in inflammatory and cell killing processes. This protein is composed of alpha and beta polypeptide chains that are linked by a disulfide bridge. An activation peptide, C5a, which is an anaphylatoxin that possesses potent spasmogenic and chemotactic activity, is derived from the alpha polypeptide via cleavage with a C5-convertase. The C5b macromolecular cleavage product can form a complex with the C6 complement component, and this complex is the basis for formation of the membrane attack complex, which includes additional complement components.

[0145] The term “comprising” is used herein to mean including the method steps or elements identified, but that such steps or elements do not comprise an exclusive list and as such, there may be present additional steps or elements.

[0146] Further, to the extent that the term “includes” is used in either the detailed description or the claims, such term is intended to be inclusive in a manner similar to the term “comprising” as “comprising” is interpreted when employed as a transitional word in a claim.

### The Present Disclosure Relates to the Following Aspects and Embodiments

Small Hairpin (shRNA) and mxRNA Oligomeric Compounds

[0147] According to a first aspect, the present disclosure is directed to an oligomeric compound capable of inhibiting expression of complement factor C5 (C5), wherein the compound comprises at least a first region of linked nucleosides having at least a first nucleobase sequence that is at least partially complementary to at least a portion of RNA transcribed from an C5 gene, wherein the first nucleobase sequence is selected from the following sequences, or a portion thereof: sequences of Table 1a (SEQ ID NOs: 1 to 250), wherein the portion optionally has a length of at least 18 nucleosides. In particular, the 5′ terminal nucleoside of the first nucleobase sequence can contain U instead of A; or U instead of G; or U instead of C, respectively.

[0148] In certain embodiments, the oligomeric compound further comprises at least a second region of linked nucleosides having at least a second nucleobase sequence that is at least partially complementary to the first nucleobase sequence and is selected from the following sequences, or a portion thereof: sequences of Table 1b (SEQ ID NOs: 251 to 500), wherein the portion optionally has a length of at least 8, 9, 10 or 11, more optionally at least 10, nucleosides.

[0149] In particular, the 3′ terminal nucleoside of the second nucleobase sequence may contain an A instead of U, G or C, respectively; and more particularly the nucleobase A as a complementary nucleobase to the 5′ terminal nucleoside of the first nucleobase sequence.

[0150] The first region of linked nucleosides is also referred to as antisense region or guide region/strand, and the second region of linked nucleosides is referred to as sense region or passenger region/strand. As disclosed in optional embodiments below, the two regions may be located on the same RNA strand, optionally in an adjacent manner. This gives rise to hairpin molecules, also referred to as mxRNAs. On the other hand, the two regions may be located on separate strands, which gives rise to double-stranded RNAs (dsRNAs), wherein optionally each strand comprises the respective region.

[0151] Without wishing to be bound by theory, it is assumed that the inventive oligomeric compounds set forth above including the first region of linked nucleosides and the second region of linked nucleosides are, during the process of RNA interference, capable of being cleaved by the protein Argonaute 2 (Ago2). The mxRNA is incorporated into the RNA-induced silencing complex (RISC). The RISC assembly then binds and degrades the target mRNA. Specifically, this is accomplished when the guide strand pairs with a complementary sequence in an C5 mRNA molecule and induces cleavage by Ago2, a catalytic component of the RISC. For that reason, as the expression of C5 is inhibited, it is believed effects correlating with overregulation of angiotensin II by the pathway described above, is inhibited too.

[0152] In certain embodiments the first nucleobase sequence is selected from the following sequences, or a portion thereof: SEQ ID NOs: 61, 30, 37, 87, 55, 66, 23, 83, 43, 47, 72, 27, 14, 28, 46, 82, 74, 75, 73, 53, 16, 36, 59, 42, and 56. Optionally the first nucleobase sequence is selected from the following sequences, or a portion thereof: SEQ ID NOs: 61, 30, 37, 83 82, 74, 75, 73, 53, 16, 36, 59, 42, and 56, optionally 30, 37, and 83, more optionally 30 and 37, most optionally 30.

[0153] In an optional embodiment thereof, the second nucleobase sequence is selected from the following sequences, or a portion thereof: SEQ ID NOs: 311, 280, 287, 333, 332, 324, 325, 323, 303, 266, 286, 309, 292, 306 and, optionally 280, 287, and 333, more optionally 30 and 37, most optionally 30.

[0154] Therefore, the oligomeric compound according to the present disclosure can comprise SEQ ID NOs 30+280 or 37+287.

### Lengths and Molecular Features of the Oligomeric Compounds According to the First Aspect

[0155] The first region of linked nucleosides comprise 18 to 35, optionally 18 to 20, more optionally 18 or 19, and yet more optionally 19 linked nucleosides. In addition, the second region of linked nucleosides comprises 10 to 35, optionally 10 to 20, more optionally 10 to 16, and yet more optionally 10 to 15, in particular 13, 14 or 15 linked nucleosides.

[0156] The oligomeric compound including the first and second regions of linked nucleosides comprises at least one complementary duplex region that comprises at least a portion of the first region of linked nucleosides directly or indirectly linked to at least a portion of the second region of linked nucleosides, wherein optionally the duplex region has a length of 10 to 19, more optionally 12 to 19, and yet more optionally 12 to 15, in particular 14 or 15, base pairs, wherein optionally there is one mismatch within the duplex region.

[0157] In certain embodiments, each of the first and second regions of linked nucleosides has a 5′ to 3′ directionality thereby defining 5′ and 3′ regions respectively thereof.

[0158] In the oligomeric compound having the first and second regions of linked nucleosides having a 5′ to 3′ directionality, the 5′ region of the first region of linked nucleosides may be directly or indirectly linked to the 3′ region of the second region of linked nucleosides, for example by complementary base pairing, wherein optionally the 5′ terminal nucleoside of the first nucleoside region base pairs with the 3′ terminal nucleoside of the second nucleoside region.

[0159] In the aforementioned embodiments, the 3′ region of the first region of linked nucleosides may be directly or indirectly linked to the 5′ region of the second region of linked nucleosides, wherein optionally the first nucleoside region is directly and covalently linked to the second nucleoside region such as by a phosphate, a phosphorothioate, or a phosphorodithioate, wherein more optionally a 3′ terminal nucleoside of the first region of linked nucleosides is directly and covalently linked to a 5′ terminal nucleoside of the second region of linked nucleosides by a phosphate, a phosphorothioate, or a phosphorodithioate. It is particularly optional that the 3′ terminal nucleoside of the first region is directly linked to the 5′ terminal nucleoside of the second region via a phosphorothioate internucleoside linkage.

[0160] This amounts to the formation of a single oligonucleotide comprising two regions being directly fused to each other. Owing to the base pairing as defined in the previous embodiment, such oligonucleotide will assume a hairpin configuration. Optimized hairpins, especially in terms of size, are the subject of further embodiments below.

[0161] In certain embodiments, the oligomeric compound comprises the first region of linked nucleosides and the second region of linked nucleosides.

[0162] Each of the regions may constitute a separate strand, thereby giving rise to a double-stranded RNA (dsRNA). Particularly optional dsRNAs of the disclosure are those with a length of the first strand of 19 nucleosides and a length of the second region of 14 or 15, optionally 14 nucleosides. When used for defining the length of a region or strand, the terms “nucleoside” and “nucleotide” (sometimes abbreviated “nt”) are used equivalently.

[0163] In the alternative, and as stated above, the two regions may be fused together, giving rise to a hairpin.

[0164] In certain embodiments, there may be an intervening third region of linked nucleosides between the first and the second region.

[0165] In optional embodiments, the oligomeric compound comprises or consists of a single strand comprising or consisting of the first, the third, and the second nucleoside regions, wherein at least a portion of the first nucleoside region is directly or indirectly linked to at least a portion of the second nucleoside region so as to form the at least partially complementary duplex region.

[0166] In other words, the oligomeric compound comprises a single strand comprising the first and second nucleoside regions, wherein at least a portion of the first nucleoside region is directly or indirectly linked to at least a portion of the second nucleoside region so as to form the at least partially complementary duplex region. As noted above, the third region is optional.

[0167] In certain embodiments, the oligomeric compound comprises consists of a single strand comprising or consisting of the first and second regions of linked nucleosides, wherein at least a portion of the first region of linked nucleosides is directly or indirectly linked to at least a portion of the second region of linked nucleosides so as to form the at least partially complementary duplex region.

[0168] In the oligomeric compound, which comprises or consists of a single strand, the first and the second nucleoside regions are directly adjacent on the single strand.

[0169] In certain embodiments, the first nucleoside region may have a greater number of linked nucleosides compared to the second nucleoside region.

[0170] Optionally, a ratio between a total number of linked nucleosides of the first nucleoside region and a total number of linked nucleosides of the second nucleoside region ranges from about 19/15 to about 19/8 or from about 18/15 to about 18/8. In particularly optional embodiments, the ratio is 19/15, 19/14, 19/13, 18/15, 18/14 or 18/13, most optionally 19/14 or

[0171] Alternatively, or in addition, a percentage of the total number of linked nucleosides of the first nucleoside region relative to the total number of nucleosides of the oligomeric compound may range from about to about 55% to about 60%. In particularly optional embodiments, the percentage may range from 57% to about 59.5%, most optionally the percentage is about 57.6% or about 59.4%.

[0172] Without wishing to be bound by theory, it is assumed that the ratio and/or percentages as mentioned above provides a suitable ratio/percentage of the number of nucleotides in the antisense (guide) strand and the number of nucleotides in the sense (passenger) strand to be processed by the RISC complex as mentioned above without being significantly degraded before, and therefore, for being effective in C5 knockdown.

[0173] In the oligomeric compound having a greater number of linked nucleotides in the first region than in the second region, the additional number of linked nucleosides of the first nucleoside region form a hairpin loop linking the first and second regions of linked nucleosides, wherein optionally a part of the first nucleobase sequence of the first nucleobase sequence being complementary RNA transcribed from an C5 gene forms the hairpin loop, wherein the loop comprises 2 to 5, optionally 4 or 5, nucleosides.

[0174] Such compounds are also referred to as hairpins or mxRNAs herein. Owing to the second region being shorter as compared to the first region, the compound is optimized in terms of size (or miniaturized) as compared to a conventional siRNA, which has two regions of comparable length.

[0175] Optionally, the loop has 4 or 5 linked nucleosides. Particularly optional is a length of the first region of 19 nucleosides, of the second region of 14 nucleosides, and of the hairpin loop of 5 nucleosides, wherein the 5 nucleosides in the hairpin are the 5 3′-terminal nucleosides of the first region. Such molecular architecture of a hairpin or mxRNA of the disclosure is also designated “14-5-14” herein.

[0176] In certain embodiments, an oligomeric single strand as disclosed earlier herein, can be selected from Table 2, in particular SEQ ID NOs: 561, 530, 537, 587, 555, 566, 523, 583, 543, 547, 572, 527, 514, 528, 546, 582, 574, 575, 573, 553, 516, 536, 559, 542, and 556, optionally 583, 530, and 537, more optionally 530 and 537, most optionally 530, wherein optionally the 5′ terminal nucleoside of the first region of linked nucleosides includes an U as the nucleobase, and the 5′ terminal nucleoside of the second region of linked nucleosides includes an A as the nucleobase.

[0177] In particular embodiments, the single strand the single strand is selected from Table 3c, in particular from SEQ ID NOs: 1011, 980, 987, 1037, 1005, 1016, 973, 1033, 993, 997, 1022, 977, 964, 978, 996, 1032, 1024, 1025, 1023, 1003, 966, 986, 1009, 992, 1006, optionally 980, 987, and 1033, more optionally 980 and 987, most optionally 980, wherein optionally the 5′ terminal nucleoside of the first region of linked nucleosides includes an U as the nucleobase, and the 5′ terminal nucleoside of the second region of linked nucleosides includes an A as the nucleobase.

[0178] In certain embodiments a hairpin loop as described earlier herein may be present at the 3′ region of the first region of linked nucleosides, wherein optionally one, two or more 3′ terminal nucleosides of the first nucleobase sequence, to the extent the nucleobases of the one, two or more 3′ terminal nucleosides permit, fold back and form or contribute to the second region of linked nucleoside.

[0179] This is a structural design also referred to as “spill-over”. It is only possible in those cases where there is self-complementarity between the nucleobases at the 3′-terminal end of the region of the guide sequence comprised in the duplex and the very 3′-terminal nucleobases of the same guide sequence. For example, this could be implemented as a 13-5-13 design, thereby allowing for further miniaturization. The first “13” refers to the region of the guide sequence involved in the duplex, 5 is the length of the loop which is also formed by the guide sequence, and the second 13 refers to the second region of the duplex and is formed by one nucleobase of the guide sequence and 12 nucleobases of the passenger region in 5′ to 3′ direction. As such, a length of the guide sequence of 19 nucleosides is maintained, but the passenger sequence is shortened to 12 nucleosides.

[0180] In certain embodiments, in case a third nucleoside region as described earlier herein, the third nucleoside region and optionally a 3′-terminal portion, optionally consisting of 1, 2, 3, 4, 5, 6, 7, 8, 9, or 10 linked nucleosides, of the first nucleoside region and/or a 5′-terminal portion, optionally consisting of 1, 2, 3, 4, 5, 6, 7, 8, 9, or 10 linked nucleosides, of the second nucleoside region may form a hairpin loop.

[0181] In certain embodiments wherein the hairpin loop comprises 1 to 8, 2 to 7, 3 to 6, optionally 4 or 5 linked nucleosides.

[0182] The oligomeric compounds according to the first aspect disclosed herein may be blunt ended.

[0183] In the oligomeric compounds according to the first aspect disclosed herein, either the first or second nucleoside region may have an overhang.

[0184] In the oligomeric compounds according to the first aspect disclosed herein, the first region may be selected from the sequences of Table 3a, or a portion thereof, in particular from SEQ ID NOs: 327, 352, 356, 362, 375 and 393.

[0185] In the oligomeric compounds according to the first aspect disclosed herein the second region may be selected from the sequences of Table 3b, or a portion thereof, especially a portion having a length of 14 nucleosides, in particular from SEQ ID NOs: 427, 452, 456, 462, 475 and 493.

[0186] The oligomeric compound may have a total length of about 25 to about 35 nucleosides, in particular about 33 or about 34 nucleosides.

[0187] In certain embodiments, a terminal nucleoside at a 5′ position of the first region has a nucleobase selected from the group consisting of A, U, G and C, optionally U, and, wherein optionally, a terminal nucleoside at a 3′ position of the second region has a base being complementary to the base at the 5′ position of the first region, optionally A.

### Ligands

[0188] The oligomeric compounds comprise one or more ligands.

[0189] The one or more ligands, in particular two or more or three ligands, may be conjugated to the second region of linked nucleosides and/or the first region of linked nucleosides.

[0190] The one or more ligands may be conjugated at the 3′ region, optionally at the 3′ terminal nucleoside of the second region of linked nucleosides and/or of the first region of linked nucleosides, and/or to the 5′ terminal nucleoside of the second region of linked nucleosides. In particular, the ligands may be conjugated to the 3′ terminal nucleoside.

[0191] The one or more ligands are any cell directing moiety, such as lipids, carbohydrates, aptamers, vitamins and/or peptides that bind cellular membrane or a specific target on cellular surface.

[0192] The one or more ligands comprises one or more, in particular three, carbohydrates.

[0193] The one or more, in particular three, carbohydrates can be a monosaccharide, disaccharide, trisaccharide, tetrasaccharide, oligosaccharide or polysaccharide.

[0194] The one or more carbohydrates comprises or consists of one or more, in particular three, hexose moieties.

[0195] The one or more, in particular three, hexose moieties are one or more galactose moieties, one or more lactose moieties, one or more, in particular three, N-Acetyl-Galactosamine moieties, and/or one or more mannose moieties.

[0196] The one or more carbohydrates comprises one or more, in particular three, N-Acetyl-Galactosamine moieties.

[0197] Alternatively, the one or more carbohydrates comprises two or more N-Acetyl-Galactosamine moieties, optionally three.

[0198] The one or more ligands are attached to the oligomeric compound, optionally to the second region of linked nucleosides thereof, in a linear configuration, or in a branched configuration.

[0199] A particularly optional ligand is the following, also referred to as “toothbrush”:

[chemical structure]

[0200] Without wishing to be bound by a particular theory, it is assumed that due to such ligand the target tissue, i.e., the liver where C5 is produced, can be selectively targeted so the oligomeric compounds can exhibit their inhibition of C5 gene more efficiently.

[0201] The one or more, in particular three, ligands may be attached to the oligomeric compound as a biantennary or triantennary configuration.

[0202] The one or more ligands as discussed above are optionally attached to the 3′ terminal nucleoside of the second region of linked nucleosides.

### Internucleoside Linkages

[0203] The oligomeric compound according to the first aspect disclosed herein comprises internucleoside linkages and wherein at least one internucleoside linkage is a modified internucleoside linkage.

[0204] The modified internucleoside linkage may be a phosphorothioate or phosphorodithioate internucleoside linkage.

[0205] The oligomeric compound according to the first aspect disclosed herein comprises 1 to 16 phosphorothioate or phosphorodithioate internucleoside linkages.

[0206] Optional modified internucleoside linkages are subject of the optional embodiments, which follow. Certain modified internucleoside linkages are known in the art and described in, for example, Hu et al., Signal Transduction and Targeted Therapy (2020) 5:101.

[0207] The oligomeric compound comprises 7, 8, 9 or 10 phosphorothioate or phosphorodithioate internucleoside linkages. The one or more phosphorothioate or phosphorodithioate internucleoside linkages may present at the 5′ region of the first region of linked nucleosides, wherein optionally, the oligomeric compound comprises three phosphorothioate internucleoside linkages at three adjacent nucleosides at the 5′ region.

[0208] In addition, the oligomeric compound comprises phosphorothioate or phosphorodithioate internucleoside linkages between at least two, optionally at least three, optionally at least four, optionally at least five, adjacent nucleosides of the hairpin loop, dependent on the number of nucleosides present in the hairpin loop. Particularly, the oligomeric compound comprises a phosphorothioate or phosphorodithioate internucleoside linkage between each adjacent nucleoside that is present in the hairpin loop.

### Modifications

[0209] In the oligomeric compound according to the first aspect of the present disclosure, at least one nucleoside comprises a modified sugar.

[0210] The modified sugar may be selected from 2′ modified sugars, a conformationally restricted nucleoside (CRN) sugar such as locked nucleic acid (LNA) sugar, (S)-constrained ethyl bicyclic nucleic acid, and constrained ethyl (cEt) sugar, tricyclo-DNA, morpholino, unlocked nucleic acid (UNA) sugar, glycol nucleic acid (GNA), D-hexitol nucleic acid (HNA), and cyclohexene nucleic acid (CeNA).

[0211] Optional modified sugars are subject of the optional embodiments, which follow. Certain modified sugars are known in the art and described in, for example, Hu et al., Signal Transduction and Targeted Therapy (2020) 5:101.

[0212] The 2′ modified sugar may be selected from 2′-O-alkyl modified sugar, 2′-O-methyl modified sugar, 2′-O-methoxyethyl modified sugar, 2′-O-allyl modified sugar, 2′-C-allyl modified sugar, 2′-deoxy modified sugar such as 2′-deoxy ribose, 2′-F modified sugar, 2′-arabino-fluoro modified sugar, 2′-O-benzyl modified sugar, and 2′-O-methyl-4-pyridine modified sugar. At least one modified sugar may be a 2′-O-methyl modified sugar.

[0213] At least one modified sugar may be a 2′-F modified sugar and, optionally, at most 16 or 17 sugars are 2′-F modified sugars. Optionally, the the sugar is ribose.

[0214] In the oligomeric compound according to the first aspect disclosed herein, sugars of the nucleosides at any of positions 2 and 14 downstream from the first nucleoside of the 5′ region of the first region of linked nucleosides, do not contain 2′-O-methyl modifications.

[0215] In certain embodiments, the 3′ terminal position of the second region of linked nucleosides does not contain a 2′-O-methyl modification.

[0216] In certain embodiments, sugars of the nucleosides at any of positions 2 and 14 downstream from the first nucleoside of the 5′ region of the first region of linked nucleosides contain 2′-F modifications.

[0217] In certain embodiments, sugars of the nucleosides of the second region of linked nucleosides that correspond in position to any of the nucleosides of the first region of linked nucleosides at any of positions 11 to 13 downstream from the first nucleoside of the 5′ region of the first region of linked nucleosides contain 2′-F modifications.

[0218] In certain embodiments, the 3′ terminal nucleoside of the second region of linked nucleosides contains a 2′-F modification.

[0219] In certain embodiments, one or more of the odd numbered nucleosides starting from the 5′ region of the first region of linked nucleosides may be modified, and/or wherein one or more of the even numbered nucleosides starting from the 5′ region of the first region of linked nucleosides may be modified, wherein typically the modification of the even numbered nucleosides is a second modification that is different from the modification of odd numbered nucleosides.

[0220] In certain embodiments, one or more of the odd numbered nucleosides starting from the 3′ region of the second region of linked nucleosides may be modified by a modification that is different from the modification of odd numbered nucleosides of the first region of linked nucleosides.

[0221] In certain embodiments, one or more of the even numbered nucleosides starting from the 3′ region of the second region of linked nucleosides is modified by a modification that is different from the modification of even numbered nucleosides of the first region of linked nucleoside.

[0222] In certain embodiments, at least one or more of the modified even numbered nucleosides of the first region of linked nucleosides is adjacent to at least one or more of the differently modified odd numbered nucleosides of the first nucleoside region.

[0223] In certain embodiments, at least one or more of the modified even numbered nucleosides of the second nucleoside region is adjacent to at least one or more of the differently modified odd numbered nucleosides of the second region of linked nucleosides.

[0224] In certain embodiments, sugars of one or more of the odd numbered nucleosides starting from the 5′ region of the first region of nucleosides may be 2′-O-methyl modified sugars.

[0225] In certain embodiments, one or more of the even numbered nucleosides starting from the 3′ region of the first region of linked nucleosides may be 2′-F modified sugars.

[0226] In certain embodiments, sugars of one or more of the odd numbered nucleosides starting from the 5′ region of the second region of linked nucleosides may be 2′-O methyl modified sugars.

[0227] In certain embodiments, one or more of the even numbered nucleosides starting from the 5′ region of the second region of linked nucleosides may be 2′-F modified sugars.

[0228] In certain embodiments, sugars of a plurality of adjacent nucleosides of the first nucleoside region may be modified by a common or different modification.

[0229] In certain embodiments, sugars of a plurality of adjacent nucleosides of the second nucleoside region may be modified by a common or different modification.

[0230] In certain embodiments, sugars of a plurality of adjacent nucleosides of the hairpin loop may be modified by a common or different modification. The common modification may be a 2′-F modified sugar.

[0231] Alternatively, the common modification may be a 2′-O-methyl modified sugar.

[0232] The plurality of adjacent 2′-O-methyl modified sugars may be present in at least eight adjacent nucleosides of the first and/or second nucleoside regions. The plurality of adjacent 2′-O-methyl modified sugars may be present in three or four adjacent nucleosides of the hairpin loop.

[0233] In certain embodiments, wherein the hairpin loop, as disclosed earlier herein, comprises at least one nucleoside having a modified sugar.

[0234] In certain embodiments, the at least one nucleoside is adjacent to a nucleoside with a differently modified sugar, wherein optionally all adjacent nucleosides in the hairpin loop have a differently modified sugar.

[0235] In certain embodiments, the modified sugar is a 2′-O-methyl modified sugar, and the differently modified sugar is a 2′-F modified sugar.

[0236] In certain embodiments one or more nucleosides of the first region of linked nucleosides and/or the second region of linked nucleosides may be an inverted nucleoside and is attached to an adjacent nucleoside via the 3′ carbon of its sugar and the 3′ carbon of the sugar of the adjacent nucleoside, and/or one or more nucleosides of the first region of linked nucleosides and/or the second region of linked nucleosides is an inverted nucleoside and is attached to an adjacent nucleoside via the 5′ carbon of its sugar and the 5′ carbon of the sugar of the adjacent nucleoside.

### Murna Nucleic Acid Constructs

[0237] According to a second aspect, the present disclosure is directed to a nucleic acid construct comprising at least:
[0238] (a) a first nucleic acid portion that is at least partially complementary to at least a first portion of an RNA, which is transcribed from an C5 gene;
[0239] (b) a second nucleic acid portion that is at least partially complementary to at least a second portion of an RNA, which is transcribed from a C5 gene, the second portion being different from the first portion;
[0240] (c) a third nucleic acid portion that is at least partially complementary to the first nucleic acid portion of (a), so as to form a first nucleic acid duplex region therewith;
[0241] (d) a fourth nucleic acid portion that is at least partially complementary to the second nucleic acid portion of (b), so as to form a second nucleic acid duplex region therewith.

[0242] The construct may be designed such that subsequent to in vivo administration the construct disassembles to yield at least first and second discrete nucleic acid targeting molecules that respectively target the RNA portions transcribed from the target genes of (a) and (b);

[0243] whereby (i) the first nucleic acid targeting molecule is capable of modulating expression of the target gene of (a), and comprises, or is derived from, at least the first nucleic acid portion of (a), and (ii) the second nucleic acid targeting molecule is capable of modulating expression of the target gene of (b), and comprises, or is derived from, the second nucleic acid portion of (b).

[0244] The construct may be designed to disassemble such that the first and second discrete nucleic acid targeting molecules are respectively processed by independent RNAi-induced silencing complexes.

### Sequence Features, Labile Functionality and Structural Features of the RNA Molecules

[0245] The construct according to the second aspect and its aforementioned embodiments may at least comprise one labile functionality such that subsequent to in vivo administration the construct is cleaved so as to yield the at least first and second discrete nucleic acid targeting molecules.

[0246] The labile functionality comprises one or more unmodified nucleotides. In particular the one or more unmodified nucleotides of the labile functionality represent one or more cleavage positions within the construct whereby subsequent to in vivo administration the construct is cleaved at the one or more cleavage positions so as to yield the at least first and second discrete nucleic acid targeting molecules. Especially the cleavage positions may be respectively located within the construct so that subsequent to cleavage the first discrete nucleic acid targeting molecule comprises, or is derived from, the first nucleic acid duplex region, and the second discrete nucleic acid targeting molecule comprises, or is derived from, the second nucleic acid duplex region. Optionally, the first discrete nucleic acid targeting molecule comprises or consists of the first nucleic acid portion of (a) and the third nucleic acid portion of (c), and/or the second discrete nucleic acid targeting molecule comprises or consists of the second nucleic acid portion of (b) and the fourth nucleic acid portion of (d).

[0247] In certain embodiments
[0248] (a) the first nucleic acid portion has a nucleobase sequence selected from SEQ ID NOs: 1 to 250 in Table 1a;
[0249] (b) the second nucleic acid portion has a nucleobase sequence selected from Table 1a (SEQ ID NOs: 1 to 250);
[0250] (c) the third nucleic acid portion has a nucleobase sequence selected from Table 1b SEQ ID NOs: 251 to 500; and/or
[0251] (d) the fourth nucleic acid portion has a nucleobase sequence selected from Table 1b (SEQ ID NOs: 251 to 500).

[0252] wherein the third and fourth nucleobase sequences, to the extent they have a length of 14 nucleobases, may be shorter by one, two or three nucleobases, wherein optionally the 5′-terminal nucleobase(s) is/are absent.

[0253] In certain such embodiments, the first nucleic acid portion of (a) may be directly or indirectly linked to the fourth nucleic acid portion of (d) as a primary structure.

[0254] In certain embodiments, the first and the fourth nucleic acid portions have the nucleobase sequences of SEQ ID NOs: 30 and 287, 30 and 333, 37 and 280, 37 and 333, 83 and 280, 83 and 287 and, respectively, optionally, wherein the sequences of SEQ ID NOs: 280, 287, and 333 may be shorter by one, two, three or four nucleobases, wherein optionally the 5′-terminal nucleobase(s) is/are absent.

[0255] In certain embodiments, the second nucleic acid portion of (b) may be directly or indirectly linked to the third nucleic acid portion of (c) as a primary structure.

[0256] In certain embodiments, the second and third nucleic acid portions have the nucleobase sequences of SEQ ID NOs: 30 and 287, 30 and 333, 37 and 280, 37 and 333, 83 and 280, 83 and 287 and, respectively, optionally, wherein the sequences of SEQ ID NOs: 280, 287, and 333 may be shorter by one, two, three or four nucleobases, wherein optionally the 5′-terminal nucleobase(s) is/are absent.

[0257] In certain embodiments, the construct may further comprise 1 to 8 additional nucleic acid portions that are respectively at least partially complementary to an additional 1 to 8 portions of RNA transcribed from one or more target genes, which target genes may be the same or different to each other, and/or the same or different to the target genes defined in (a) and/or (b), and wherein each of the 1 to 8 additional nucleic acid portions respectively form additional duplex regions with respective passenger nucleic acid portions that are respectively at least partially complementary therewith. In particular, the second nucleic acid portion of (b), and the 1 to 8 additional nucleic acid portions, may be directly or indirectly linked to selected passenger nucleic acid portions as respective primary structures.

[0258] In certain embodiments the direct or indirect linking may represent either (i) an internucleotide bond, (ii) an internucleotide nick, or (iii) a nucleic acid linker portion of 1, 2, 3, 4, 5, 6, 7, 8, 9, or 10 nucleotides, the nucleic acid linker optionally being single stranded. Optionally, the linking may be direct, thereby giving rise to (a) contiguous strand(s).

[0259] In certain embodiments, there may exist some complementarity between the first nucleic acid portion of (a) and the second nucleic acid portion of (b), or the third nucleic acid portion of (c) and the fourth nucleic acid portion of (d). Optionally the complementarity
[0260] (i) may be 1, 2, 3, 4, 5, 6, 7, 8, 9, or 10, optionally 2, 3, 4 or 5 base pairs; and/or
[0261] (ii) may be between the first nucleic acid portion of (a) and the second nucleic acid portion of (b).

[0262] In certain embodiments, the internucleotide bond may involve at least one of the one or more unmodified nucleotides, wherein optionally cleavage may occur at the 3′ position of (at least one of) the unmodified nucleotide(s).

[0263] In certain embodiments, the first nucleic acid portion of (a), and/or the second nucleic acid portion of (b), and/or the third nucleic acid portion of (c), and/or the fourth nucleic acid portion of (d), may be respectively 7 to 25 nucleotides in length. Optionally, the first nucleic acid portion of (a) and/or the second nucleic acid portion of (b) may have a length of 18 to 21, more optionally 18 to 20, and yet more optionally 19 nucleotides. In optional embodiments, the first nucleic acid portion of (a) and the second nucleic acid portion of (b) have a length of 19 nucleotides. It may be further optional that the third nucleic acid portion of (c), and/or the fourth nucleic acid portion of (d) have a length of 11 to 20, more optionally 13 to 16, and yet more optionally 14 or 15, most optionally 14 nucleotides.

[0264] In certain embodiments, the first nucleic portion of (a) and the second nucleic acid portion of (b) may have a length of 19 nucleotides and the third nucleic acid portion of (c) as well as the fourth nucleic acid portion of (b) may have a length of 14 nucleotides.

[0265] In certain embodiments, the unmodified nucleotide(s) is/are at any of position 18 to 25, more optionally at any of positions 18 to 21, and/or the 3′ terminal position of the first nucleic acid portion of (a) and/or of the third nucleic acid portion of (c).

[0266] In certain embodiments, wherein the unmodified nucleotide is at position 19.

[0267] In certain embodiments, the first nucleic portion of (a) and the second nucleic acid portion of (b) may have a length of 19 nucleotides and the third nucleic acid portion of (c) as well as the fourth nucleic acid portion of (b) may have a length of 14 nucleotides and the unmodified nucleoside is at position 19 of the first nucleic acid portion of (a) and the second nucleic acid portion of (b).

[0268] In certain embodiments, the nucleic acid linker portion may be 1 to 8 nucleotides in length, optionally 2 to 7 or 3 to 6 nucleotides in length, more optionally about 4 or 5 and most optionally 4 nucleotides in length.

[0269] In certain embodiments, one, more of all of the duplex regions independently may have a length of 10 to 19, more optionally 13 to 19, and yet more optionally 13, 14 or 15 base pairs, most optionally 14 base pairs, wherein optionally there is one mismatch within the duplex region.

[0270] In certain embodiments, the nucleic acid construct may be blunt ended.

[0271] In certain embodiments,
[0272] the first nucleic acid portion of (a); and/or
[0273] the second nucleic acid portion of (b); and/or
[0274] the third nucleic acid portion of (c); and/or
[0275] the fourth nucleic acid portion of (d); and/or
[0276] to the extent present, the 1 to 8 additional nucleic acid portions as defined previously herein; and/or
[0277] to the extent present, the passenger nucleic acid portions as defined previously herein;
[0278] may have an overhang.

[0279] In certain embodiments, the target RNA may be an mRNA or another RNA molecule.

### Ligands

[0280] The nucleic acid construct according to the second aspect and the aforementioned embodiments may further comprise one or more ligands.

[0281] In certain embodiments, the first nucleic acid portion of (a), and/or the second nucleic acid portion of (b), and/or the third nucleic acid portion of (c), and/or the fourth nucleic acid portion of (d), and/or, to the extent present, the 1 to 8 additional nucleic acid portions as defined previously herein, and/or the passenger nucleic acid portions as defined previously herein, respectively may have a 5′ to 3′ directionality thereby defining 5′ and 3′ regions thereof.

[0282] In certain embodiments, one or more ligands are conjugated at the 3′ region, optionally the 3′ end, of any of (i) the third nucleic acid portion of (c), and/or (ii) the fourth nucleic acid portion of (d), and/or, to the extent present, the (iii) passenger nucleic acid portions as defined previously herein.

[0283] In certain embodiments, one or more ligands may be conjugated at one or more regions intermediate of the 5′ and 3′ regions of any of the nucleic acid portions, optionally of the third nucleic acid portion of (c), and/or the fourth nucleic acid portion of (d), and/or the passenger nucleic acid portions as defined previously herein.

[0284] In certain embodiments, one or more ligands may be conjugated at the 5′ region, optionally the 5′ end, of any of the nucleic acid portions.

[0285] In certain embodiments, the one or more ligands may be any cell directing moiety, such as lipids, carbohydrates, aptamers, vitamins and/or peptides that bind cellular membrane or a specific target on cellular surface. In an optional embodiment, the one or more carbohydrates can be a monosaccharide, disaccharide, trisaccharide, tetrasaccharide, oligosaccharide or polysaccharide. In a more optional embodiment, the one or more carbohydrates comprises one or more hexose moieties. Especially, the one or more hexose moieties may be one or more galactose moieties, one or more lactose moieties, one or more N-Acetyl-Galactosamine moieties, and/or one or more mannose moieties. The hexose moiety may comprise two or three N-Acetyl-Galactosamine moieties. In particular, the hexose moiety comprises three N-Acetyl-Galactosamine moieties.

[0286] In certain embodiments, the one or more ligands may be attached in a linear configuration, or in a branched configuration. Optionally, wherein the one or more ligands may be attached as a biantennary or triantennary configuration, or as a configuration based on single ligands at different positions.

[0287] Optionally, the ligand may have the following structure:

[chemical structure]

### Internucleoside Linkages

[0288] The nucleotide construct according to the second aspect of the present disclosure or its aforementioned embodiments comprises one or more phosphorothioate or phosphorodithioate internucleotide linkages.

[0289] In certain embodiments, the nucleic acid construct comprises 1 to 15 phosphorothioate or phosphorodithioate internucleotide linkages.

[0290] In certain embodiments, the nucleic acid construct comprises one or more phosphorothioate or phosphorodithioate internucleotide linkages at one or more of the 5′ and/or 3′ regions of the first nucleic acid portion of (a), and/or the second nucleic acid portion of (b), and/or the third nucleic acid portion of (c), and/or the fourth nucleic acid portion of (d), and/or the 1 to 8 additional nucleic acid portions as defined previously herein, and/or the passenger nucleic acid portions as defined in previously herein.

[0291] In certain embodiments, the nucleic acid construct comprises phosphorothioate or phosphorodithioate internucleotide linkages between at least two adjacent nucleotides of the nucleic acid linker portion as defined in previously herein.

[0292] In certain embodiments, the nucleic acid construct comprises a phosphorothioate or phosphorodithioate internucleotide linkage between each adjacent nucleotide that is present in the nucleic acid linker portion.

[0293] In certain embodiments, the nucleic acid construct comprises a phosphorothioate or phosphorodithioate internucleotide linkage linking:
[0294] the first nucleic acid portion of (a) to the nucleic acid linker portion as defined in previously herein; and/or
[0295] the second nucleic acid portion of (b) to the nucleic acid linker portion as defined previously herein; and/or
[0296] the third nucleic acid portion of (c) to the nucleic acid linker portion as defined previously herein and/or
[0297] the fourth nucleic acid portion of (d) to the nucleic acid linker portion as defined previously herein; and/or
[0298] the 1 to 8 additional nucleic acid portions as defined previously herein to the nucleic acid linker portion as further defined previously herein; and/or
[0299] the passenger nucleic acid portions as defined previously herein to the nucleic acid linker portion as further defind previously herein.

### Modifications

[0300] In the nucleic acid construct according to the second aspect of the present disclosure and its aforementioned embodiments, at least one nucleotide of at least one of the following may be modified:
[0301] the first nucleic acid portion of (a); and/or
[0302] the second nucleic acid portion of (b); and/or
[0303] the third nucleic acid portion of (c); and/or
[0304] the fourth nucleic acid portion of (d); and/or
[0305] to the extent present, the 1 to 8 additional nucleic acid portions as defined previously herein; and/or
[0306] to the extent present, the passenger nucleic acid portions as defined previously herein; and/or
[0307] to the extent present, the nucleic acid linker portion as further defined previously herein.

[0308] In an optional embodiment, one or more of the odd numbered nucleotides starting from the 5′ region of one of the following may be modified, and/or wherein one or more of the even numbered nucleotides starting from the 5′ region of one of the following are modified, wherein typically the modification of the even numbered nucleotides is a second modification that is different from the modification of odd numbered nucleotides:
[0309] the first nucleic acid portion of (a); and/or
[0310] the second nucleic acid portion of (b); and/or
[0311] the third nucleic acid portion of (c); and/or
[0312] the fourth nucleic acid portion of (d); and/or
[0313] to the extent present, the 1 to 8 additional nucleic acid portions as defined previously herein; and/or
[0314] to the extent present, the passenger nucleic acid portions as defined previously herein.

[0315] In certain embodiments, one or more of the odd numbered nucleotides starting from the 3′ region of the third nucleic acid portion of (c) may be modified by a modification that is different from the modification of odd numbered nucleotides starting from the 5′ region of the first nucleic acid portion of (a); and/or
[0316] one or more of the odd numbered nucleotides starting from the 3′ region of the fourth nucleic acid portion of (d) may be modified by a modification that is different from the modification of odd numbered nucleotides starting from the 5′ region of the second nucleic acid portion of (b); and/or
[0317] one or more of the odd numbered nucleotides starting from the 3′ region of the passenger nucleic acid portions as defined previously herein, to the extent present, may be modified by a modification that is different from the modification of odd numbered nucleotides starting from the 5′ region of the 1 to 8 additional nucleic acid portions as defined previously herein; and/or
[0318] wherein one or more of the nucleotides of a nucleic acid linker portion as further defined previously herein, to the extent present, may be modified by a modification that (i) is different from the modification of an adjacent nucleotide of the 3′ region of the first nucleic acid portion of (a); and/or (ii) is different from the modification of an adjacent nucleotide of the 3′ region of the second nucleic acid portion of (b); and/or is different from the modification of an adjacent nucleotide of the 3′ region of the 1 to 8 additional nucleic acid portions, to the extent present, as defined previously herein.

[0319] In certain embodiments, one or more of the even numbered nucleotides starting from the 3′ region of: (i) the third nucleic acid portion of (c), and/or (ii) the fourth nucleic acid portion of (d), and/or (iii) the passenger nucleic acid portions as defined previously herein, to the extent present, may be modified by a modification that is different from the modification of odd numbered nucleotides starting from the 3′ region of these respective portions.

[0320] In certain embodiments, at least one or more of the modified even numbered nucleotides of (i) the first nucleic acid portion of (a), and/or (ii) the second nucleic acid portion of (b), and/or (iii), to the extent present, the 1 to 8 additional nucleic acid portions as defined previously herein, may be adjacent to at least one or more differently modified odd numbered nucleotides of these respective portions.

[0321] In certain embodiments, at least one or more of the modified even numbered nucleotides of (i) the third nucleic acid portion of (c), and/or (ii) the fourth nucleic acid portion of (d), and/or (iii), to the extent present, the passenger nucleic acid portions as defined previously herein, may be adjacent to at least one or more differently modified odd numbered nucleotides of these respective portions.

[0322] In certain embodiments, a plurality of adjacent nucleotides of (i) the first nucleic acid portion of (a), and/or (ii) the second nucleic acid portion of (b), and/or (iii), to the extent present, the 1 to 8 additional nucleic acid portions as defined previously herein, may be modified by a common modification.

[0323] In certain embodiments, a plurality of adjacent nucleotides of (i) the third nucleic acid portion of (c), and/or (ii) the fourth nucleic acid portion of (d), and/or (iii), to the extent present, the passenger nucleic acid portions as defined previously herein, may be modified by a common modification.

[0324] In certain embodiments, the plurality of adjacent commonly modified nucleotides may be 2 to 4 adjacent nucleotides, optionally 3 or 4 adjacent nucleotides.

[0325] In certain embodiments, the plurality of adjacent commonly modified nucleotides may be located in the 5′ region of (i) the third nucleic acid portion of (c), and/or (ii) the fourth nucleic acid portion of (d), and/or (iii), to the extent present, the passenger nucleic acid portions previously herein.

[0326] In certain embodiments, a plurality of adjacent commonly modified nucleotides may be located in the nucleic acid linker portion as further defined previously herein.

[0327] In certain embodiments, the one or more of the modified nucleotides of first nucleic acid portion of (a) may not have a common modification present in the corresponding nucleotide of the third nucleic acid portion of (c) of the first duplex region; and/or one or more of the modified nucleotides of second nucleic acid portion of (b) may not have a common modification present in the corresponding nucleotide of the fourth nucleic acid portion of (d) of the second duplex region; and/or one or more of the modified nucleotides of the 1 to 8 additional nucleic acid portions, to the extent present, as defined previously herein, may not have a common modification present in the corresponding nucleotide of the corresponding passenger nucleic acid portions of the respective duplex regions.

[0328] In certain embodiments, the one or more of the modified nucleotides of the first nucleic acid portion of (a) may be shifted by at least one nucleotide relative to a commonly modified nucleotide of the third nucleic acid portion of (c); and/or one or more of the modified nucleotides of the second nucleic acid portion of (b) may be shifted by at least one nucleotide relative to a commonly modified nucleotide of the fourth nucleic acid portion of (d); and/or one or more of the modified nucleotides of the 1 to 8 additional nucleic acid portions, to the extent present, as defined previously herein may be shifted by at least one nucleotide relative to a commonly modified nucleotide of the passenger nucleic acid portions, to the extent present, as defined previously herein.

[0329] In certain embodiments, the modification and/or modifications may be each and individually sugar, phosphate, or base modifications.

[0330] In certain embodiments, the modification may be selected from nucleotides with 2′ modified sugars; conformationally restricted nucleotides (CRN) sugar such as locked nucleic acid (LNA), (S)-constrained ethyl bicyclic nucleic acid, and constrained ethyl (cEt), tricyclo-DNA; morpholino, unlocked nucleic acid (UNA), glycol nucleic acid (GNA), D-hexitol nucleic acid (HNA), and cyclohexene nucleic acid (CeNA). In optional embodiments, wherein the 2′ modified sugar may be selected from 2′-O-alkyl modified sugar, 2′-O-methyl modified sugar, 2′-O-methoxyethyl modified sugar, 2′-O-allyl modified sugar, 2′-C-allyl modified sugar, 2′-deoxy modified sugar such as 2′-deoxy ribose, 2′-F modified sugar, 2′-arabino-fluoro modified sugar, 2′-O-benzyl modified sugar, 2′-amino modified sugar, and 2′-O-methyl-4-pyridine modified sugar.

[0331] In certain embodiments, the base modification may be any one of an abasic nucleotide and a non-natural base comprising nucleotide.

[0332] In certain embodiments, at least one modification may be a 2′-O-methyl modification in a ribose moiety.

[0333] In certain embodiments, at least one modification may be a 2′-F modification in a ribose moiety.

[0334] In certain embodiments, the nucleotides at any of positions 2 and 14 downstream from the first nucleotide of the 5′ region of (i) the first nucleic acid portion of (a); and/or (ii) the second nucleic acid portion of (b); and/or (iii), to the extent present, the 1 to 8 additional nucleic acid portions as defined previously herein; may not contain 2′-O-methyl modifications in ribose moieties.

[0335] In certain embodiments, one, two or all three nucleotides of (i) the third nucleic acid portion of (c); and/or (ii) the fourth nucleic acid portion of (d); and/or (iii), to the extent present, the passenger nucleic acid portions as defined previously herein; that respectively correspond in position to any of the nucleotides at any of positions 11 to 13 downstream from the first nucleotide of the 5′ region of (i) the first nucleic acid portion of (a); and/or (ii) the second nucleic acid portion of (b); and/or (iii) the 1 to 8 additional nucleic acid portions, to the extent present, as defined previously herein; may not contain 2′-O-methyl modifications in ribose moieties.

[0336] In certain embodiments, the nucleotides at any of positions 2 and 14 downstream from the first of (i) the first nucleic acid portion of (a); and/or (ii) the second nucleic acid portion of (b); and/or (iii), to the extent present, the 1 to 8 additional nucleic acid portions as defined previously herein; may contain 2′-F modifications in ribose moieties.

[0337] In certain embodiments, one, two or all three nucleotides of (i) the third nucleic acid portion of (c); and or (ii) the fourth nucleic acid portion of (d); and/or (iii), to the extent present, the passenger nucleic acid portions as defined previously herein; that respectively correspond in position to any of the nucleotides at any of positions 11 to 13 downstream from the first nucleotide of the 5′ region of (i) the first nucleic acid portion of (a); and/or (ii) the second nucleic acid portion of (b); and/or (iii), to the extent present, the 1 to 8 additional nucleic acid portions as defined previously herein; may contain 2′-F modifications in ribose moieties.

[0338] In certain embodiments, all remaining nucleotides may contain either 2′-O-methyl modifications or 2′-F modifications in ribose moieties, optionally with the exception of the unmodified nucleotide(s) in accordance with the labile linkage defined herein. Optionally, the remaining nucleotides may contain 2′-O-methyl modifications in ribose moieties.

[0339] In certain embodiments, the one or more, optionally one, unmodified nucleotide represents any of the nucleotides of the nucleic acid linker portion as further defined previously herein, optionally the nucleotide of the nucleic acid linker portion as further defined previously herein that is adjacent to (i) the third nucleic acid portion of (c); and or (ii) the fourth nucleic acid portion of (d); and/or (iii), to the extent present, the passenger nucleic acid portions as defined previously herein.

[0340] In certain embodiments,
[0341] (a) the first nucleic acid portion may be selected from Table 3a;
[0342] (b) the second nucleic acid portion may be selected from Table 3a;
[0343] (c) the third nucleic acid portion may be selected from Table 3b; and/or
[0344] (d) the fourth nucleic acid portion may be selected from Table 3b.

[0345] In optional embodiments, the first nucleic acid portion and the second nucleic acid portion may be selected from Table 3a, wherein the first and second nucleic acid portions are different; and the third and fourth nucleic acid portions may be selected from Table 3b.

[0346] In certain embodiments, the 3′ terminal positions of the first and the third nucleic acid portions may be replaced with an unmodified nucleotide.

[0347] In certain embodiments, the nucleic acid construct comprises at least one vinylphosphonate modification, such as at least one vinylphosphonate modification in the 5′ region of (i) the first nucleic acid portion of (a); and/or (ii) the second nucleic acid portion of (b); and/or (iii), to the extent present, the 1 to 8 additional nucleic acid portions as defined previously herein.

[0348] In certain embodiments, one or more nucleotides of
[0349] the first nucleic acid portion of (a); and/or
[0350] the second nucleic acid portion of (b); and/or
[0351] the third nucleic acid portion of (c); and/or
[0352] the fourth nucleic acid portion of (d); and/or
[0353] to the extent present, the 1 to 8 additional nucleic acid portions as defined previously herein; and/or
[0354] to the extent present, the passenger nucleic acid portions as defined previously herein;
[0355] may be an inverted an inverted nucleotide and may be attached to the adjacent nucleotide via the 3′ carbon of the nucleotide and the 3′ carbon of the adjacent nucleotide, and/or may be an inverted nucleotide and may be attached to the adjacent nucleotide via the 5′ carbon of the nucleotide and the 5′ carbon of the adjacent nucleotide.

[0356] In certain embodiments, the inverted nucleotide may be attached to the adjacent nucleotide via a phosphate group by way of a phosphodiester linkage; or may be attached to the adjacent nucleotide via a phosphorothioate group; or may be attached to the adjacent nucleotide via a phosphorodithioate group.

Compositions and Pharmaceutical Compositions Including shRNA, mxRNA and/or muRNA Oligomeric Constructs

[0357] According to a third aspect, the present disclosure is directed to a composition comprising an oligomeric compound according to the first aspect and/or a nucleic acid construct according the second aspect of the present disclosure, and a physiologically acceptable excipient.

[0358] According to a fourth aspect, the present disclosure is directed to pharmaceutical composition comprising an oligomeric compound according to the first aspect and/or a nucleic acid construct according to the second aspect of the present disclosure.

[0359] The pharmaceutical composition may further comprise a pharmaceutically acceptable excipient, diluent, antioxidant, and/or preservative.

[0360] The oligomeric compound according to the first aspect and/or the construct according to the second aspect may be the only pharmaceutically active agent(s).

[0361] Alternatively, the pharmaceutical composition furthermore comprises one or more further pharmaceutically active agents. The further pharmaceutically active agent(s) is/are (an) agent(s) which modulate(s) the innate and/or the adaptive immune system, for example a further oligomeric compound which is directed to an immune system target different from complement component C5, optionally Interleukin-6; agents lowering the expression or level of Interleukin-6; or an agent such as an antibody targeting a complement component, the antibody optionally being Eculizumab. Optionally the oligomeric compound and/or the nucleic acid construct; and the further pharmaceutically active agent(s) are to be administered concomitantly or in any order.

Diseases to be Treated by shRNA, mxRNA and/or muRNA Oligomeric Compounds and Further Uses

[0362] According to a fifth aspect, the present disclosure is directed to an oligomeric compound according to the first aspect and/or a nucleic acid construct according to the second aspect of the present disclosure, for use in human or veterinary medicine or therapy.

[0363] According to a sixth aspect, the present disclosure is directed to an oligomeric compound according to the first aspect and/or a nucleic acid construct according to the second aspect of the present disclosure, for use in a method of treating, ameliorating and/or preventing a disease or disorder.

[0364] The disease or disorder may be a disease or disorder associated C5 or a disease or disorder requiring reduction of C5 expression.

[0365] In particular, the disease or disorder is selected from the group consisting of autoimmune disease, complement system dysfunction including aberrant upregulation of complement components such as C5, age-related macular degeneration (AMD) including dry AMD and geographic atrophy, paroxysmal nocturnal hemoglobinuria (PNH), Generalized myasthenia gravis (gMG), Lupus nephritis (LN), Alzheimer's disease, Atherosclerosis, Inflammation of the choroid plexus, atypical hemolytic uremic syndrome (aHUS), C3 glomerulopathy (C3G), Ig-mediated kidney pathologies such as IgA nephropathy and primary membranous nephropathy, asthma, rheumatic disease, rheumatoid arthritis, systemic lupus crythematosus (SLE), anti-neutrophil cytoplasmic antibody (ANCA) vasculitis, antiphospholipid antibody syndrome (APS), glomerulonephritis, dermatomyositis bullous pemphigoid, Shiga toxin E. coli-related hemolytic uremic syndrome, amyotrophic lateral sclerosis (ALS), Central nervous system (CNS) diseases, myasthenia gravis (MG), neuromyelistis optica (NMO), dense deposit disease, C3 neuropathy, cold agglutinin disease, humoral and vascular transplant rejection, graft dysfunction, myocardial infarction, asthma, rheumatoid arthritis (RA) sensitization towards a transplant, antiphospho lipid antibody syndrome; lupus nephritis; ischemia-reperfusion injury; typical or infectious hemolytic uremic syndrome (tHUS); dense deposit disease (DDD); neuromyelitis optica (N O); multifocal motor neuropathy (MMN); multiple sclerosis (MS); macular degeneration (e.g., age-related macular degeneration (AM D)); hemolysis, elevated liver enzymes, and low platelets (HELLP) syndrome; thrombotic thrombocytopenia purpura (TTP); spontaneous fetal loss; Pauci-immune vasculitis; epidermolysis bullosa; recurrent fetal loss; pre-eclampsia, traumatic brain injury, myasthenia gravis, cold agglutinin disease, dermatomyositis bullous pemphigoid, Shiga toxin E. co/-related hemolytic uremic syndrome, C3 nephropathy, anti-neutrophil cytoplasmic antibody-associated vasculitis, humoral and vascular transplant rejection, graft dysfunction, myocardial infarction, an allogenic transplant, sepsis, Coronary artery disease, dermatomyositis, Graves' disease, atherosclerosis, systemic inflammatory response sepsis, septic shock, spinal cord injury, glomerulonephritis, Hashimoto's thyroiditis, type I diabetes, pemphigus, autoimmune hemolytic anemia (AIHA), ITP, Goodpasture syndrome, Degos disease, antiphospholipid syndrome (APS), catastrophic APS (CAPS), a cardiovascular disorder, myocarditis, a cerebrovascular disorder, a peripheral vascular disorder, a renovascular disorder, a mesenteric/enteric vascular disorder, vasculitis, Henoch-Schonlein purpura nephritis, systemic lupus erythematosus-associated vasculitis, vasculitis associated with rheumatoid arthritis, immune comple vasculitis, Takayasu's disease, dilated cardiomyopathy, diabetic angiopathy, Kawasaki's disease (arteritis), venous gas embolus (VGE), and restenosis following stent placement, rotational atherectomy, membrancous nephropathy, Guiliain-Barre syndrome, and percutaneous transluminal coronary angioplasty Age-related macular degeneration (AMD) and/or Geographic atrophy (GA); Uveitis and/or panuveitis; Cold agglutinin disease, Membranoproliferative glomerulonephritis (MPGN), Guillain-Barré syndrome, Shiga toxin-producing E. coli hemolytic-uremic syndrome (STEC-HUS), organ transplantation-associated autoimmune diseases, and sepsis. According to a seventh aspect, the present disclosure is directed to a method of treating a disease or disorder comprising administration of an oligomeric compound according the first aspect and/or a nucleic acid construct according to the second aspect of the present disclosure, to an individual in need of treatment.

[0366] In particular, the disease of disorder is selected from paroxysmal nocturnal hemoglobinuria (PNH), Alzheimer's disease, Atherosclerosis, Inflammation of the choroid plexus, Generalized myasthenia gravis (gMG), amyotrophic lateral sclerosis (ALS), Lupus nephritis (LN), Central nervous system (CNS) diseases; Age-related macular degeneration (AMD) and/or Geographic atrophy (GA); Uveitis and/or panuveitis; Cold agglutinin disease, Membranoproliferative glomerulonephritis (MPGN), Guillain-Barré syndrome, Shiga toxin-producing E. coli hemolytic-uremic syndrome (STEC-HUS) and organ transplantation-associated autoimmune diseases.

[0367] In certain embodiments, the nucleic acid construct and/or the oligomeric compound is administered at a dose of about 0.05 mg/kg to about 50.0 mg/kg, optionally 0.05 mg/kg to about 30.0 mg/kg or 10.0 mg/kg to about 50.0 mg/kg of body weight of the human subject. In other words, the mass indicated in “mg” is the mass of administred nucleic acid construct and/or oligomeric compound and the mass indicated in “kg” is the kilogram bodyweight of the human subjects to which the “mg” mass refers.

[0368] The oligomeric compound and/or the nucleic acid construct may be administered subcutaneously or intravenously to the individual.

[0369] According to an eighth aspect, the present disclosure is directed to a use of an oligomeric compound according to the first aspect or a nucleic acid construct according to the second aspect, for use in research as a gene function analysis tool.

[0370] According to a ninth aspect, the present disclosure is directed to a use of an oligomeric compound according to the first aspect and/or a nucleic acid construct according to the second aspect in the manufacture of a medicament for a treatment of a disease or disorder.

### Constructs and Sequences of the Oligomeric Compounds

[0371] The following Tables show nucleobase sequences of antisense and sense strands of oligomeric compounds of the disclosure as well as of nucleobase sequences of single-stranded oligomeric compounds of the disclosure, and definitions of modified oligomeric compounds of the disclosure (the notation including nucleobase sequence, sugar modifications, and, where applicable, modified phosphates).

[0372] The notation used is common in the art and as the following meaning:
[0373] A represents adenine;
[0374] U represents uracil;
[0375] C represents cytosine;
[0376] G represents guanine.
[0377] 5Phos represents a 5′ terminal phosphate group which is optional but not indispensable;
[0378] m represents a methyl modification at the 2′ position of the sugar of the underlying nucleoside;
[0379] f represents a fluoro modification at the 2′ position of the sugar of the underlying nucleoside;
[0380] r indicates an unmodified (2′-OH) ribonucleotide;
[0381] [Ps] or #represents a phosphorothioate inter-nucleoside linkage;
[0382] i represents an inverted inter-nucleoside linkage, which can be either 3′-3′, or 5′-5′;
[0383] 3×GalNAc represents a trivalent GalNAc.

[0384] Tables 1a and 1b below show nucleobase sequences of antisense and sense strands of 250 oligomeric compounds in accordance with the Examples.

TABLE 1a
Nucleobase sequences of the antisense strands of
250 constructs of the disclosure

| | Antisense | |
|---|---|---|
| SEQ ID NO: | ID | 19 mer Antisense |
| 1 | 24151 | ACACAGUUUGGCCUGGAGA |
| 2 | 24152 | GGAAUCUUGAAGUCAGGAA |
| 3 | 24153 | CUGGGCUUGUAGCUGGCAC |
| 4 | 24154 | UCAAGUAAUUAUAGUGAGU |
| 5 | 24155 | AAACAGGUUUGUCUGUAUG |
| 6 | 24156 | GCAGACAUUUUAACACAGA |
| 7 | 24157 | ACCUGGAGCUGGUUGCCAC |
| 8 | 24158 | GAUAAAAUCAAGUAAUUAU |
| 9 | 24159 | GACACAGUUUGGCCUGGAG |
| 10 | 24160 | CGGAAUCUUGAAGUCAGGA |
| 11 | 24161 | AGACAUUUUAACACAGAAC |
| 12 | 24162 | UGAAGUCAGGAAAAGAGAU |
| 13 | 24163 | CACAGUUUGGCCUGGAGAA |
| 14 | 24164 | AAUUAUAGUGAGUUAUUUU |
| 15 | 24165 | UCCAAGUCAGAUGUCUCUU |
| 16 | 24166 | UCAGGAAAAGAGAUAAUUC |
| 17 | 24167 | GGCAAGACAUAUUCUUUAA |
| 18 | 24168 | GAAGGCCAAUUUCCAGAGG |
| 19 | 24169 | CAAGUAAUUAUAGUGAGUU |
| 20 | 24170 | AUAAAAUCAAGUAAUUAUA |
| 21 | 24171 | AUCAAGUAAUUAUAGUGAG |
| 22 | 24172 | GCCAAUUUCCAGAGGAAGC |
| 23 | 24173 | AGUAAUUAUAGUGAGUUAU |
| 24 | 24174 | UAAAGGUACUUGUUGUUUA |
| 25 | 24175 | GACUGCUGUUUCAGAAUCA |
| 26 | 24176 | ACUGCUGUUUCAGAAUCAA |
| 27 | 24177 | AUAUAAAGGUACUUGUUGU |
| 28 | 24178 | UGUAAACAGUUCCUUUCAA |
| 29 | 24179 | GGUAACUUUGGCUGAGAGA |
| 30 | 24180 | UAUAGUUGUAAACAGUUCC |
| 31 | 24181 | ACAUAUUCUUUAACUUCAA |
| 32 | 24182 | AAGCAGUCCUUUUACACUC |
| 33 | 24183 | UAGUGAGUUAUUUUGUCAA |
| 34 | 24184 | AGGAAGACAUCUUUGAACA |
| 35 | 24185 | GCAGUCCUUUUACACUCAA |
| 36 | 24186 | AGUUAUUUUGUCAAUAUAU |
| 37 | 24187 | GUACAACAGAAUAUGGUAU |
| 38 | 24188 | GUUAUUUUGUCAAUAUAUG |
| 39 | 24189 | CAGGCUUCAGGAAAAGAGG |
| 40 | 24190 | AGGAAAAGAGAUAAUUCCA |
| 41 | 24191 | UGUUACAGCAAUAUAAAGG |
| 42 | 24192 | UAUAAGCAUAUGCAAUCUC |
| 43 | 24193 | CAUAUUCUUUAACUUCAAA |
| 44 | 24194 | AAGACAUCUUUGAACACCU |
| 45 | 24195 | CCAGGAAGACAUCUUUGAA |
| 46 | 24196 | UACAGCAAUAUAAAGGUAC |
| 47 | 24197 | CAUUGUCAUAGGUUAUUGG |
| 48 | 24198 | UGAGUUAUUUUGUCAAUAU |
| 49 | 24199 | AGUGAGUUAUUUUGUCAAU |
| 50 | 24200 | GUGAGUUAUUUUGUCAAUA |
| 51 | 24201 | GAAUUUUCCUUGAAAGAUC |
| 52 | 24202 | ACUGUUACAGCAAUAUAAA |
| 53 | 24203 | AAAUCCAUUGUCAUAGGUU |
| 54 | 24204 | AAUCCAUUGUCAUAGGUUA |
| 55 | 24205 | GAGAAAUCCAUUGUCAUAG |
| 56 | 24206 | AAGACAUAUUCUUUAACUU |
| 57 | 24207 | AAGUGCAGAUUCCCUCCAC |
| 58 | 24208 | AUCCAUUGUCAUAGGUUAU |
| 59 | 24209 | AGACAUCUUUGAACACCUU |
| 60 | 24210 | CCAUUGUCAUAGGUUAUUG |
| 61 | 24211 | UGAAGAGAAAUCCAUUGUC |
| 62 | 24212 | GACAUAUUCUUUAACUUCA |
| 63 | 24213 | CAGUCCUUUUACACUCAAA |
| 64 | 24214 | AAUUUUCCUUGAAAGAUCC |
| 65 | 24215 | UGAAAUUGUAUUUUAUCUG |
| 66 | 24216 | AGUAAUUUCAAAAUUCUUA |
| 67 | 24217 | CAAAAUUCUUAAAGUUCUU |
| 68 | 24218 | UGAAUUUUGGUUCUGCUCU |
| 69 | 24219 | UGUCAUUUUAUAAUUAUGU |
| 70 | 24220 | CCAAAUCCUGUACUGACAA |
| 71 | 24221 | GGAUAACUUUUAAUAGAGA |
| 72 | 24222 | UUUAAGUCUUCUCUUAUUC |
| 73 | 24223 | GAUAAUUCCAAUAUGAUCA |
| 74 | 24224 | GGAUAAAUGAACAUGGCCU |
| 75 | 24225 | CAAGGUUCAUCAUUUUCUU |
| 76 | 24226 | UGGAAGUGCUAUAAAACAU |
| 77 | 24227 | CCAAGUACUCUUAAAGCAA |
| 78 | 24228 | UCCAAUGAUUUCCUGUUUC |
| 79 | 24229 | UAUGGUAUAUUCAUUUCCA |
| 80 | 24230 | GAACAAGAUGAACUUCCCA |
| 81 | 24231 | UGAACUUCAGGAAUUUUAG |
| 82 | 24232 | AAGUCUUCUCUUAUUCCAA |
| 83 | 24233 | GAAUGUUUAUACUUUGAUA |
| 84 | 24234 | CCGGAAUCGUACACAAAGG |
| 85 | 24235 | CAUACCUCUGCUCUUCUGA |
| 86 | 24236 | GAUCAAUUUCUUCUACCAU |
| 87 | 24237 | CAACAUUGUGUUUUGCAUU |
| 88 | 24238 | UAACUUUAUAAGCAUAUGC |
| 89 | 24239 | CAGGAUAACUUUUAAUAGA |
| 90 | 24240 | UUUUAUUGGUUGAUACUGU |
| 91 | 24241 | UGCAACUGUUUUCUUCUGG |
| 92 | 24242 | UGCUUUGAUACAACUUCCA |
| 93 | 24243 | CCAAAGCUUCUCUCUUCAA |
| 94 | 24244 | GGGAACUCCUUUCGUCUGC |
| 95 | 24245 | UAUGACAGUUCUUUGACUG |
| 96 | 24246 | UUGCAGAAUAACAUGUCCA |
| 97 | 24247 | CAGAAGUCCUAUAGUUGUA |
| 98 | 24248 | GAUAACUUUUAAUAGAGAU |
| 99 | 24249 | ACUAAGAUUUCUUUUCCAA |
| 100 | 24250 | GAUAAAUGAACAUGGCCUG |
| 101 | 24251 | GAUGAACAUGUUGUGUCUC |
| 102 | 24252 | UGAUCAUCUUUUAAGUCUU |
| 103 | 24253 | GAGCAAUUCCAUUUAUCAA |
| 104 | 24254 | UGUGAAUUUUCCUUGAAAG |
| 105 | 24255 | UCAAAAUUCUUAAAGUUCU |
| 106 | 24256 | UAAACUCCAGCACCGUCAC |
| 107 | 24257 | UUGAUAUUGGAAGUGCUAU |
| 108 | 24258 | GUGCAUUCAGUGUUACUGG |
| 109 | 24259 | AAUGUUUAUACUUUGAUAA |
| 110 | 24260 | AAAUUGUAUUUUAUCUGGA |
| 111 | 24261 | UAAGUCUUCUCUUAUUCCA |
| 112 | 24262 | AGAAGUCCUAUAGUUGUAA |
| 113 | 24263 | CUUGCUUUUAUAGUAAUUU |
| 114 | 24264 | UCAACAUUGUGUUUUGCAU |
| 115 | 24265 | AGGCAGUUGUUUCUACCAU |
| 116 | 24266 | UAUGAUCAAUUUCUUCUAC |
| 117 | 24267 | GUAAUUUCAAAAUUCUUAA |
| 118 | 24268 | AUCAACAUUGUGUUUUGCA |
| 119 | 24269 | CAAAGUAUUCCCAAAAGGC |
| 120 | 24270 | AAAACAUGGUACACUGUUU |
| 121 | 24271 | ACACAGAACUGCAUCCCAG |
| 122 | 24272 | UCCAAGUACUCUUAAAGCA |
| 123 | 24273 | UGUAGUAUGACAGUUCUUU |
| 124 | 24274 | CAGAAUAGCUUUCCCUUUU |
| 125 | 24275 | GCUUUUAUAGUAAUUUCAA |
| 126 | 24276 | GAAGCUACUCCAUCAUCAA |
| 127 | 24277 | UGCCACUAAUUCUAAGUAA |
| 128 | 24278 | GUAGACUCUAUGACUGUUA |
| 129 | 24279 | CUAAGAUUUCUUUUCCAAA |
| 130 | 24280 | CAAUAUUUAACCAGACUGA |
| 131 | 24281 | UAGUAAUUUCAAAAUUCUU |
| 132 | 24282 | GGAAAAGAGAUAAUUCCAA |
| 133 | 24283 | AAAAUGCUUGACACGAUGA |
| 134 | 24284 | UAUAUUCAUUUCCAGGAAG |
| 135 | 24285 | UAAUAAAAGCAAGUGCCAC |
| 136 | 24286 | UACUAUGCGUUUGUAAUCA |
| 137 | 24287 | GAAUUGAAAUACUCUUUCC |
| 138 | 24288 | UCAGGAUAACUUUUAAUAG |
| 139 | 24289 | UACAACUUCCAAAUACACA |
| 140 | 24290 | AAUCAUUCUCUAAUAAAAG |
| 141 | 24291 | GAAUAGCUUUCCCUUUUGA |
| 142 | 24292 | GGAAAUUCUUGUCUGUCAU |
| 143 | 24293 | UUGAAUUUUGGUUCUGCUC |
| 144 | 24294 | AGUGAGCUUUACAAAUAAG |
| 145 | 24295 | AAACAUGGUACACUGUUUA |
| 146 | 24296 | UAGACUCUAUGACUGUUAC |
| 147 | 24297 | UUUUCUUGGGAGUCAUCUG |
| 148 | 24298 | GUAGGCAAGGAGAUGUCCA |
| 149 | 24299 | AAAGCCACCUCCAUACCUC |
| 150 | 24300 | UAAGAUUUCUUUUCCAAAC |
| 151 | 24301 | AAAGCUGCAAACUUCCUCA |
| 152 | 24302 | UCUAAUAAAAGCAAGUGCC |
| 153 | 24303 | CAAUUGUUUGUGCAUUCAG |
| 154 | 24304 | ACCAAAGCUUCUCUCUUCA |
| 155 | 24305 | GCAACUGUUUUCUUCUGGG |
| 156 | 24306 | AUGCUUUGAUACAACUUCC |
| 157 | 24307 | AAUUCAUCUAAAUUAGCUA |
| 158 | 24308 | UGUGACGAUGUAAUAGACC |
| 159 | 24309 | GGUACACUGUUUAUCUGGU |
| 160 | 24310 | GGUUGCCUUGUACUUGACA |
| 161 | 24311 | CCAAGGAAAUUCUUGUCUG |
| 162 | 24312 | UUAACCAGACUGAAUCAGA |
| 163 | 24313 | UAGCAGCUAUUUCUUCUAU |
| 164 | 24314 | CCAGUUUUGUAGAUAUCCA |
| 165 | 24315 | AAUGAUUUCCUGUUUCCAG |
| 166 | 24316 | AGACAAGAUCUCACCUACA |
| 167 | 24317 | GUGGAUUACCUUUAACCAA |
| 168 | 24318 | UGAUACUGUGAAUUUUCCU |
| 169 | 24319 | AAUACUGGGACAACGCUCA |
| 170 | 24320 | CAUAAUUAAGUACUGUCUU |
| 171 | 24321 | CAAACUUCCUCAGAGGUAC |
| 172 | 24322 | AAGGCCAUGUUAUUUCAGA |
| 173 | 24323 | UGCAAACUGUAUGCAGCUG |
| 174 | 24324 | AGAAUAGCUUUCCCUUUUG |
| 175 | 24325 | UACUGUGAAUUUUCCUUGA |
| 176 | 24326 | CCAACUUCAAAGAGUUCAA |
| 177 | 24327 | CUGAAUUUUGAUAUUGGAA |
| 178 | 24328 | AAAGGCUGUAAGAUAUAAG |
| 179 | 24329 | UUGCUUUUAUAGUAAUUUC |
| 180 | 24330 | GUCCAAGUACUCUUAAAGC |
| 181 | 24331 | ACACUAAUUCUGCUGUCUG |
| 182 | 24332 | CUGGCUUGCUUACUGGUAA |
| 183 | 24333 | GUUGCCUUGUACUUGACAA |
| 184 | 24334 | CAGCAUUUCUGUAGGACAU |
| 185 | 24335 | UUAUACUUUGAUAAGAUGC |
| 186 | 24336 | UUAAGUACUGUCUUCCUUU |
| 187 | 24337 | CUGCAAACUUCCUCAGAGG |
| 188 | 24338 | AAGACAGUUUCUCUUUUGG |
| 189 | 24339 | AUUCAGUUUGUAGGGAGAG |
| 190 | 24340 | UGGAAUGUUUAUACUUUGA |
| 191 | 24341 | UAACAGGGUCUUCAUGUGU |
| 192 | 24342 | AGAGAUUGUUGCAUCAAAU |
| 193 | 24343 | GAGUCAUCUGCAUUUGCAU |
| 194 | 24344 | GAAUGUUUAUAUUUAGCAG |
| 195 | 24345 | GGAACAAGAUGAACUUCCC |
| 196 | 24346 | GGUAUUUCUGCCUCUUCAG |
| 197 | 24347 | CAGAACUGCAUCCCAGAAG |
| 198 | 24348 | UUCCGGUGUCCAAUAACCU |
| 199 | 24349 | CAUCAAUUGUUUGUGCAUU |
| 200 | 24350 | AAUACUCUUUCCAAGGGCU |
| 201 | 24351 | UCAAAUGCUUCAGUGUAUC |
| 202 | 24352 | AAGCAAGUGCCACUAAUUC |
| 203 | 24353 | UUAAUAGAGAUUGUUGCAU |
| 204 | 24354 | AUAGAGAUUGUUGCAUCAA |
| 205 | 24355 | GAACUCCUUUCGUCUGCUA |
| 206 | 24356 | GUCAUUUUAUAAUUAUGUA |
| 207 | 24357 | AAGAAUUGAAAUACUCUUU |
| 208 | 24358 | AAAGCCUUUCUAAUUCCAA |
| 209 | 24359 | UCAAUAUUUAACCAGACUG |
| 210 | 24360 | UGGUAUAUUCAUUUCCAGG |
| 211 | 24361 | UGAAACAAUUGAACGAAAC |
| 212 | 24362 | AAUAUCUUGCUUUUAUAGU |
| 213 | 24363 | AGAGAUUGUCAGAUCCAAU |
| 214 | 24364 | AGCAAUUCCAUUUAUCAAC |
| 215 | 24365 | UUAUCAGGAUAACUUUUAA |
| 216 | 24366 | CGAAUUUCUGGCUUGCUUA |
| 217 | 24367 | UCAAGUUCAGACUGGUGAG |
| 218 | 24368 | AGAGGUACUGGUUUUGUGA |
| 219 | 24369 | GGUAUUUUCUUUCAAGCAA |
| 220 | 24370 | AGGUACUGGUUUUGUGAAC |
| 221 | 24371 | CAGAUUCCCUCCACAGCAG |
| 222 | 24372 | UAGUCAGCAUUUCUGUAGG |
| 223 | 24373 | AUUAGCACGGAGCUGGCUU |
| 224 | 24374 | UAAGAGACACAGUUUGGCC |
| 225 | 24375 | GAACAUGUUGUGUCUCUAG |
| 226 | 24376 | CAUAAGUGCAAACUGUAUG |
| 227 | 24377 | CAAAUUCAGUUUGUAGGGA |
| 228 | 24378 | ACAAGCAGUCCUUUUACAC |
| 229 | 24379 | AAGUAUUCCCAAAAGGCCC |
| 230 | 24380 | CAAUCACAGUAAAGGCUGU |
| 231 | 24381 | AAUAGCUUUCCCUUUUGAC |
| 232 | 24382 | UAUUGGUUGAUACUGUGAA |
| 233 | 24383 | CAGAAAUGGCCAAUGUAAA |
| 234 | 24384 | UUGUAAUCAGAGUUUCCGU |
| 235 | 24385 | ACUCAGGCUUUAAUGAUCA |
| 236 | 24386 | CAGCUAUUUCUUCUAUCUU |
| 237 | 24387 | AUAUCUUGCUUUUAUAGUA |
| 238 | 24388 | ACAAGGUUCAUCAUUUUCU |
| 239 | 24389 | AUUGUGUUUUGCAUUGCUG |
| 240 | 24390 | GCCACAAUAAAGAAUUACA |
| 241 | 24391 | GGUGGAUUACCUUUAACCA |
| 242 | 24392 | CUUCUCUCUUCAAAGCUGA |
| 243 | 24393 | UGGGAUGCUUCAAUAUCCU |
| 244 | 24394 | AAAUCUUCUAAACUGUAGU |
| 245 | 24395 | AAAUUCAGUUUGUAGGGAG |
| 246 | 24396 | CUGUCAUUUUAUAAUUAUG |
| 247 | 24397 | AAUGCUUUGAUACAACUUC |
| 248 | 24398 | UCCUCUUUAUAUUUAGCCU |
| 249 | 24399 | GCAAAUUCAUCUAAAUUAG |
| 250 | 24400 | UUCCAAAUACACAUAAGAA |

TABLE 1b
Nucleobase sequences of the sense strands of 250
construc

| SEQ ID NO | Sense ID | 14 mer Sense |
|---|---|---|
| 251 | 14151 | AGGCCAAACUGUGU |
| 252 | 14152 | GACUUCAAGAUUCC |
| 253 | 14153 | AGCUACAAGCCCAG |
| 254 | 14154 | CUAUAAUUACUUGA |
| 255 | 14155 | AGACAAACCUGUUU |
| 256 | 14156 | GUUAAAAUGUCUGC |
| 257 | 14157 | AACCAGCUCCAGGU |
| 258 | 14158 | UACUUGAUUUUAUC |
| 259 | 14159 | GGCCAAACUGUGUC |
| 260 | 14160 | ACUUCAAGAUUCCG |
| 261 | 14161 | GUGUUAAAAUGUCU |
| 262 | 14162 | UUUUCCUGACUUCA |
| 263 | 14163 | CAGGCCAAACUGUG |
| 264 | 14164 | AACUCACUAUAAUU |
| 265 | 14165 | ACAUCUGACUUGGA |
| 266 | 14166 | AUCUCUUUUCCUGA |
| 267 | 14167 | GAAUAUGUCUUGCC |
| 268 | 14168 | GGAAAUUGGCCUUC |
| 269 | 14169 | ACUAUAAUUACUUG |
| 270 | 14170 | UUACUUGAUUUUAU |
| 271 | 14171 | UAUAAUUACUUGAU |
| 272 | 14172 | CUCUGGAAAUUGGC |
| 273 | 14173 | UCACUAUAAUUACU |
| 274 | 14174 | AACAAGUACCUUUA |
| 275 | 14175 | CUGAAACAGCAGUC |
| 276 | 14176 | UCUGAAACAGCAGU |
| 277 | 14177 | AAGUACCUUUAUAU |
| 278 | 14178 | AGGAACUGUUUACA |
| 279 | 14179 | CAGCCAAAGUUACC |
| 280 | 14180 | UGUUUACAACUAUA |
| 281 | 14181 | GUUAAAGAAUAUGU |
| 282 | 14182 | UAAAAGGACUGCUU |
| 283 | 14183 | AAAAUAACUCACUA |
| 284 | 14184 | AAAGAUGUCUUCCU |
| 285 | 14185 | UGUAAAAGGACUGC |
| 286 | 14186 | UUGACAAAAUAACU |
| 287 | 14187 | AUAUUCUGUUGUAC |
| 288 | 14188 | AUUGACAAAAUAAC |
| 289 | 14189 | UUUCCUGAAGCCUG |
| 290 | 14190 | UUAUCUCUUUUCCU |
| 291 | 14191 | AUAUUGCUGUAACA |
| 292 | 14192 | UGCAUAUGCUUAUA |
| 293 | 14193 | AGUUAAAGAAUAUG |
| 294 | 14194 | UUCAAAGAUGUCUU |
| 295 | 14195 | AGAUGUCUUCCUGG |
| 296 | 14196 | UUUAUAUUGCUGUA |
| 297 | 14197 | AACCUAUGACAAUG |
| 298 | 14198 | GACAAAAUAACUCA |
| 299 | 14199 | CAAAAUAACUCACU |
| 300 | 14200 | ACAAAAUAACUCAC |
| 301 | 14201 | UUCAAGGAAAAUUC |
| 302 | 14202 | AUUGCUGUAACAGU |
| 303 | 14203 | AUGACAAUGGAUUU |
| 304 | 14204 | UAUGACAAUGGAUU |
| 305 | 14205 | ACAAUGGAUUUCUC |
| 306 | 14206 | AAAGAAUAUGUCUU |
| 307 | 14207 | GGGAAUCUGCACUU |
| 308 | 14208 | CUAUGACAAUGGAU |
| 309 | 14209 | GUUCAAAGAUGUCU |
| 310 | 14210 | ACCUAUGACAAUGG |
| 311 | 14211 | UGGAUUUCUCUUCA |
| 312 | 14212 | UUAAAGAAUAUGUC |
| 313 | 14213 | GUGUAAAAGGACUG |
| 314 | 14214 | UUUCAAGGAAAAUU |
| 315 | 14215 | AAAAUACAAUUUCA |
| 316 | 14216 | AUUUUGAAAUUACU |
| 317 | 14217 | CUUUAAGAAUUUUG |
| 318 | 14218 | AGAACCAAAAUUCA |
| 319 | 14219 | AUUAUAAAAUGACA |
| 320 | 14220 | AGUACAGGAUUUGG |
| 321 | 14221 | AUUAAAAGUUAUCC |
| 322 | 14222 | AGAGAAGACUUAAA |
| 323 | 14223 | AUAUUGGAAUUAUC |
| 324 | 14224 | AUGUUCAUUUAUCC |
| 325 | 14225 | AAUGAUGAACCUUG |
| 326 | 14226 | UUAUAGCACUUCCA |
| 327 | 14227 | UUAAGAGUACUUGG |
| 328 | 14228 | AGGAAAUCAUUGGA |
| 329 | 14229 | AUGAAUAUACCAUA |
| 330 | 14230 | AGUUCAUCUUGUUC |
| 331 | 14231 | AUUCCUGAAGUUCA |
| 332 | 14232 | AUAAGAGAAGACUU |
| 333 | 14233 | AAGUAUAAACAUUC |
| 334 | 14234 | GUGUACGAUUCCGG |
| 335 | 14235 | AGAGCAGAGGUAUG |
| 336 | 14236 | AGAAGAAAUUGAUC |
| 337 | 14237 | AAAACACAAUGUUG |
| 338 | 14238 | UGCUUAUAAAGUUA |
| 339 | 14239 | UAAAAGUUAUCCUG |
| 340 | 14240 | AUCAACCAAUAAAA |
| 341 | 14241 | AGAAAACAGUUGCA |
| 342 | 14242 | GUUGUAUCAAAGCA |
| 343 | 14243 | GAGAGAAGCUUUGG |
| 344 | 14244 | CGAAAGGAGUUCCC |
| 345 | 14245 | AAAGAACUGUCAUA |
| 346 | 14246 | AUGUUAUUCUGCAA |
| 347 | 14247 | CUAUAGGACUUCUG |
| 348 | 14248 | UAUUAAAAGUUAUC |
| 349 | 14249 | AAAGAAAUCUUAGU |
| 350 | 14250 | CAUGUUCAUUUAUC |
| 351 | 14251 | ACAACAUGUUCAUC |
| 352 | 14252 | UUAAAAGAUGAUCA |
| 353 | 14253 | AAAUGGAAUUGCUC |
| 354 | 14254 | AAGGAAAAUUCACA |
| 355 | 14255 | UUUAAGAAUUUUGA |
| 356 | 14256 | GGUGCUGGAGUUUA |
| 357 | 14257 | ACUUCCAAUAUCAA |
| 358 | 14258 | AACACUGAAUGCAC |
| 359 | 14259 | AAAGUAUAAACAUU |
| 360 | 14260 | AUAAAAUACAAUUU |
| 361 | 14261 | UAAGAGAAGACUUA |
| 362 | 14262 | ACUAUAGGACUUCU |
| 363 | 14263 | ACUAUAAAAGCAAG |
| 364 | 14264 | AAACACAAUGUUGA |
| 365 | 14265 | AGAAACAACUGCCU |
| 366 | 14266 | AGAAAUUGAUCAUA |
| 367 | 14267 | AAUUUUGAAAUUAC |
| 368 | 14268 | AACACAAUGUUGAU |
| 369 | 14269 | UUGGGAAUACUUUG |
| 370 | 14270 | GUGUACCAUGUUUU |
| 371 | 14271 | AUGCAGUUCUGUGU |
| 372 | 14272 | UAAGAGUACUUGGA |
| 373 | 14273 | ACUGUCAUACUACA |
| 374 | 14274 | GGAAAGCUAUUCUG |
| 375 | 14275 | AUUACUAUAAAAGC |
| 376 | 14276 | GAUGGAGUAGCUUC |
| 377 | 14277 | UAGAAUUAGUGGCA |
| 378 | 14278 | GUCAUAGAGUCUAC |
| 379 | 14279 | AAAAGAAAUCUUAG |
| 380 | 14280 | CUGGUUAAAUAUUG |
| 381 | 14281 | UUUUGAAAUUACUA |
| 382 | 14282 | AUUAUCUCUUUUCC |
| 383 | 14283 | GUGUCAAGCAUUUU |
| 384 | 14284 | UGGAAAUGAAUAUA |
| 385 | 14285 | ACUUGCUUUUAUUA |
| 386 | 14286 | ACAAACGCAUAGUA |
| 387 | 14287 | GAGUAUUUCAAUUC |
| 388 | 14288 | AAAAGUUAUCCUGA |
| 389 | 14289 | AUUUGGAAGUUGUA |
| 390 | 14290 | AUUAGAGAAUGAUU |
| 391 | 14291 | AGGGAAAGCUAUUC |
| 392 | 14292 | AGACAAGAAUUUCC |
| 393 | 14293 | GAACCAAAAUUCAA |
| 394 | 14294 | UUGUAAAGCUCACU |
| 395 | 14295 | AGUGUACCAUGUUU |
| 396 | 14296 | AGUCAUAGAGUCUA |
| 397 | 14297 | GACUCCCAAGAAAA |
| 398 | 14298 | AUCUCCUUGCCUAC |
| 399 | 14299 | AUGGAGGUGGCUUU |
| 400 | 14300 | GAAAAGAAAUCUUA |
| 401 | 14301 | AAGUUUGCAGCUUU |
| 402 | 14302 | UUGCUUUUAUUAGA |
| 403 | 14303 | UGCACAAACAAUUG |
| 404 | 14304 | AGAGAAGCUUUGGU |
| 405 | 14305 | AAGAAAACAGUUGC |
| 406 | 14306 | UUGUAUCAAAGCAU |
| 407 | 14307 | AAUUUAGAUGAAUU |
| 408 | 14308 | AUUACAUCGUCACA |
| 409 | 14309 | AUAAACAGUGUACC |
| 410 | 14310 | AGUACAAGGCAACC |
| 411 | 14311 | AAGAAUUUCCUUGG |
| 412 | 14312 | UUCAGUCUGGUUAA |
| 413 | 14313 | AGAAAUAGCUGCUA |
| 414 | 14314 | AUCUACAAAACUGG |
| 415 | 14315 | AACAGGAAAUCAUU |
| 416 | 14316 | GUGAGAUCUUGUCU |
| 417 | 14317 | UAAAGGUAAUCCAC |
| 418 | 14318 | AAUUCACAGUAUCA |
| 419 | 14319 | GUUGUCCCAGUAUU |
| 420 | 14320 | AGUACUUAAUUAUG |
| 421 | 14321 | UCUGAGGAAGUUUG |
| 422 | 14322 | AAUAACAUGGCCUU |
| 423 | 14323 | GCAUACAGUUUGCA |
| 424 | 14324 | GGGAAAGCUAUUCU |
| 425 | 14325 | GAAAAUUCACAGUA |
| 426 | 14326 | CUCUUUGAAGUUGG |
| 427 | 14327 | AUAUCAAAAUUCAG |
| 428 | 14328 | AUCUUACAGCCUUU |
| 429 | 14329 | UACUAUAAAAGCAA |
| 430 | 14330 | AAGAGUACUUGGAC |
| 431 | 14331 | AGCAGAAUUAGUGU |
| 432 | 14332 | AGUAAGCAAGCCAG |
| 433 | 14333 | AAGUACAAGGCAAC |
| 434 | 14334 | CUACAGAAAUGCUG |
| 435 | 14335 | UUAUCAAAGUAUAA |
| 436 | 14336 | AAGACAGUACUUAA |
| 437 | 14337 | GAGGAAGUUUGCAG |
| 438 | 14338 | AGAGAAACUGUCUU |
| 439 | 14339 | CCUACAAACUGAAU |
| 440 | 14340 | GUAUAAACAUUCCA |
| 441 | 14341 | UGAAGACCCUGUUA |
| 442 | 14342 | AUGCAACAAUCUCU |
| 443 | 14343 | AAUGCAGAUGACUC |
| 444 | 14344 | AAAUAUAAACAUUC |
| 445 | 14345 | GUUCAUCUUGUUCC |
| 446 | 14346 | GAGGCAGAAAUACC |
| 447 | 14347 | GGGAUGCAGUUCUG |
| 448 | 14348 | AUUGGACACCGGAA |
| 449 | 14349 | ACAAACAAUUGAUG |
| 450 | 14350 | UUGGAAAGAGUAUU |
| 451 | 14351 | ACUGAAGCAUUUGA |
| 452 | 14352 | AGUGGCACUUGCUU |
| 453 | 14353 | ACAAUCUCUAUUAA |
| 454 | 14354 | GCAACAAUCUCUAU |
| 455 | 14355 | GACGAAAGGAGUUC |
| 456 | 14356 | AAUUAUAAAAUGAC |
| 457 | 14357 | GUAUUUCAAUUCUU |
| 458 | 14358 | AUUAGAAAGGCUUU |
| 459 | 14359 | UGGUUAAAUAUUGA |
| 460 | 14360 | AAAUGAAUAUACCA |
| 461 | 14361 | GUUCAAUUGUUUCA |
| 462 | 14362 | AAAAGCAAGAUAUU |
| 463 | 14363 | AUCUGACAAUCUCU |
| 464 | 14364 | UAAAUGGAAUUGCU |
| 465 | 14365 | AGUUAUCCUGAUAA |
| 466 | 14366 | AAGCCAGAAAUUCG |
| 467 | 14367 | CAGUCUGAACUUGA |
| 468 | 14368 | AAACCAGUACCUCU |
| 469 | 14369 | UGAAAGAAAAUACC |
| 470 | 14370 | CAAAACCAGUACCU |
| 471 | 14371 | GUGGAGGGAAUCUG |
| 472 | 14372 | AGAAAUGCUGACUA |
| 473 | 14373 | AGCUCCGUGCUAAU |
| 474 | 14374 | AACUGUGUCUCUUA |
| 475 | 14375 | GACACAACAUGUUC |
| 476 | 14376 | AGUUUGCACUUAUG |
| 477 | 14377 | ACAAACUGAAUUUG |
| 478 | 14378 | AAAGGACUGCUUGU |
| 479 | 14379 | UUUUGGGAAUACUU |
| 480 | 14380 | CUUUACUGUGAUUG |
| 481 | 14381 | AAGGGAAAGCUAUU |
| 482 | 14382 | AGUAUCAACCAAUA |
| 483 | 14383 | AUUGGCCAUUUCUG |
| 484 | 14384 | AACUCUGAUUACAA |
| 485 | 14385 | AUUAAAGCCUGAGU |
| 486 | 14386 | AGAAGAAAUAGCUG |
| 487 | 14387 | UAAAAGCAAGAUAU |
| 488 | 14388 | AUGAUGAACCUUGU |
| 489 | 14389 | AUGCAAAACACAAU |
| 490 | 14390 | UUCUUUAUUGUGGC |
| 491 | 14391 | AAAGGUAAUCCACC |
| 492 | 14392 | UUUGAAGAGAGAAG |
| 493 | 14393 | AUUGAAGCAUCCCA |
| 494 | 14394 | AGUUUAGAAGAUUU |
| 495 | 14395 | UACAAACUGAAUUU |
| 496 | 14396 | UUAUAAAAUGACAG |
| 497 | 14397 | UGUAUCAAAGCAUU |
| 498 | 14398 | AAAUAUAAAGAGGA |
| 499 | 14399 | UUAGAUGAAUUUGC |
| 500 | 14400 | AUGUGUAUUUGGAA |

[0385] Table 2 below shows the nucleobase sequences of the 250 hairpin constructs of the disclosure as selected in accordance with the Examples. The nucleobase sequences are a direct fusion of the antisense sequences of Table 1a with the corresponding sense sequences of Table 1b.

TABLE 2
Nucleobase sequences of 250 constructs in which the sense and
the antisense sequences of Tables 1a and 1b are combined.

| SEQ ID NO: | Sense ID | Antisense ID | Sequence of 33 mer Hairpin |
|---|---|---|---|
| 501 | 14151 | 24151 | ACACAGUUUGGCCUGGAGAAGGCCAAACUGU |
| | | | GU |
| 502 | 14152 | 24152 | GGAAUCUUGAAGUCAGGAAGACUUCAAGAUU |
| | | | CC |
| 503 | 14153 | 24153 | CUGGGCUUGUAGCUGGCACAGCUACAAGCCC |
| | | | AG |
| 504 | 14154 | 24154 | UCAAGUAAUUAUAGUGAGUCUAUAAUUACUU |
| | | | GA |
| 505 | 14155 | 24155 | AAACAGGUUUGUCUGUAUGAGACAAACCUGU |
| | | | UU |
| 506 | 14156 | 24156 | GCAGACAUUUUAACACAGAGUUAAAAUGUCU |
| | | | GC |
| 507 | 14157 | 24157 | ACCUGGAGCUGGUUGCCACAACCAGCUCCAG |
| | | | GU |
| 508 | 14158 | 24158 | GAUAAAAUCAAGUAAUUAUUACUUGAUUUUAU |
| | | | C |
| 509 | 14159 | 24159 | GACACAGUUUGGCCUGGAGGGCCAAACUGUG |
| | | | UC |
| 510 | 14160 | 24160 | CGGAAUCUUGAAGUCAGGAACUUCAAGAUUC |
| | | | CG |
| 511 | 14161 | 24161 | AGACAUUUUAACACAGAACGUGUUAAAAUGUC |
| | | | U |
| 512 | 14162 | 24162 | UGAAGUCAGGAAAAGAGAUUUUUCCUGACUU |
| | | | CA |
| 513 | 14163 | 24163 | CACAGUUUGGCCUGGAGAACAGGCCAAACUG |
| | | | UG |
| 514 | 14164 | 24164 | AAUUAUAGUGAGUUAUUUUAACUCACUAUAAU |
| | | | U |
| 515 | 14165 | 24165 | UCCAAGUCAGAUGUCUCUUACAUCUGACUUG |
| | | | GA |
| 516 | 14166 | 24166 | UCAGGAAAAGAGAUAAUUCAUCUCUUUUCCU |
| | | | GA |
| 517 | 14167 | 24167 | GGCAAGACAUAUUCUUUAAGAAUAUGUCUUG |
| | | | CC |
| 518 | 14168 | 24168 | GAAGGCCAAUUUCCAGAGGGGAAAUUGGCCU |
| | | | UC |
| 519 | 14169 | 24169 | CAAGUAAUUAUAGUGAGUUACUAUAAUUACUU |
| | | | G |
| 520 | 14170 | 24170 | AUAAAAUCAAGUAAUUAUAUUACUUGAUUUUA |
| | | | U |
| 521 | 14171 | 24171 | AUCAAGUAAUUAUAGUGAGUAUAAUUACUUGA |
| | | | U |
| 522 | 14172 | 24172 | GCCAAUUUCCAGAGGAAGCCUCUGGAAAUUG |
| | | | GC |
| 523 | 14173 | 24173 | AGUAAUUAUAGUGAGUUAUUCACUAUAAUUAC |
| | | | U |
| 524 | 14174 | 24174 | UAAAGGUACUUGUUGUUUAAACAAGUACCUU |
| | | | UA |
| 525 | 14175 | 24175 | GACUGCUGUUUCAGAAUCACUGAAACAGCAG |
| | | | UC |
| 526 | 14176 | 24176 | ACUGCUGUUUCAGAAUCAAUCUGAAACAGCA |
| | | | GU |
| 527 | 14177 | 24177 | AUAUAAAGGUACUUGUUGUAAGUACCUUUAU |
| | | | AU |
| 528 | 14178 | 24178 | UGUAAACAGUUCCUUUCAAAGGAACUGUUUA |
| | | | CA |
| 529 | 14179 | 24179 | GGUAACUUUGGCUGAGAGACAGCCAAAGUUA |
| | | | CC |
| 530 | 14180 | 24180 | UAUAGUUGUAAACAGUUCCUGUUUACAACUA |
| | | | UA |
| 531 | 14181 | 24181 | ACAUAUUCUUUAACUUCAAGUUAAAGAAUAUG |
| | | | U |
| 532 | 14182 | 24182 | AAGCAGUCCUUUUACACUCUAAAAGGACUGC |
| | | | UU |
| 533 | 14183 | 24183 | UAGUGAGUUAUUUUGUCAAAAAAUAACUCACU |
| | | | A |
| 534 | 14184 | 24184 | AGGAAGACAUCUUUGAACAAAAGAUGUCUUC |
| | | | CU |
| 535 | 14185 | 24185 | GCAGUCCUUUUACACUCAAUGUAAAAGGACU |
| | | | GC |
| 536 | 14186 | 24186 | AGUUAUUUUGUCAAUAUAUUUGACAAAAUAAC |
| | | | U |
| 537 | 14187 | 24187 | GUACAACAGAAUAUGGUAUAUAUUCUGUUGU |
| | | | AC |
| 538 | 14188 | 24188 | GUUAUUUUGUCAAUAUAUGAUUGACAAAAUAA |
| | | | C |
| 539 | 14189 | 24189 | CAGGCUUCAGGAAAAGAGGUUUCCUGAAGCC |
| | | | UG |
| 540 | 14190 | 24190 | AGGAAAAGAGAUAAUUCCAUUAUCUCUUUUCC |
| | | | U |
| 541 | 14191 | 24191 | UGUUACAGCAAUAUAAAGGAUAUUGCUGUAA |
| | | | CA |
| 542 | 14192 | 24192 | UAUAAGCAUAUGCAAUCUCUGCAUAUGCUUA |
| | | | UA |
| 543 | 14193 | 24193 | CAUAUUCUUUAACUUCAAAAGUUAAAGAAUAU |
| | | | G |
| 544 | 14194 | 24194 | AAGACAUCUUUGAACACCUUUCAAAGAUGUCU |
| | | | U |
| 545 | 14195 | 24195 | CCAGGAAGACAUCUUUGAAAGAUGUCUUCCU |
| | | | GG |
| 546 | 14196 | 24196 | UACAGCAAUAUAAAGGUACUUUAUAUUGCUG |
| | | | UA |
| 547 | 14197 | 24197 | CAUUGUCAUAGGUUAUUGGAACCUAUGACAA |
| | | | UG |
| 548 | 14198 | 24198 | UGAGUUAUUUUGUCAAUAUGACAAAAUAACUC |
| | | | A |
| 549 | 14199 | 24199 | AGUGAGUUAUUUUGUCAAUCAAAAUAACUCAC |
| | | | U |
| 550 | 14200 | 24200 | GUGAGUUAUUUUGUCAAUAACAAAAUAACUCA |
| | | | C |
| 551 | 14201 | 24201 | GAAUUUUCCUUGAAAGAUCUUCAAGGAAAAUU |
| | | | C |
| 552 | 14202 | 24202 | ACUGUUACAGCAAUAUAAAAUUGCUGUAACAG |
| | | | U |
| 553 | 14203 | 24203 | AAAUCCAUUGUCAUAGGUUAUGACAAUGGAU |
| | | | UU |
| 554 | 14204 | 24204 | AAUCCAUUGUCAUAGGUUAUAUGACAAUGGA |
| | | | UU |
| 555 | 14205 | 24205 | GAGAAAUCCAUUGUCAUAGACAAUGGAUUUC |
| | | | UC |
| 556 | 14206 | 24206 | AAGACAUAUUCUUUAACUUAAAGAAUAUGUCU |
| | | | U |
| 557 | 14207 | 24207 | AAGUGCAGAUUCCCUCCACGGGAAUCUGCAC |
| | | | UU |
| 558 | 14208 | 24208 | AUCCAUUGUCAUAGGUUAUCUAUGACAAUGG |
| | | | AU |
| 559 | 14209 | 24209 | AGACAUCUUUGAACACCUUGUUCAAAGAUGU |
| | | | CU |
| 560 | 14210 | 24210 | CCAUUGUCAUAGGUUAUUGACCUAUGACAAU |
| | | | GG |
| 561 | 14211 | 24211 | UGAAGAGAAAUCCAUUGUCUGGAUUUCUCUU |
| | | | CA |
| 562 | 14212 | 24212 | GACAUAUUCUUUAACUUCAUUAAAGAAUAUGU |
| | | | C |
| 563 | 14213 | 24213 | CAGUCCUUUUACACUCAAAGUGUAAAAGGAC |
| | | | UG |
| 564 | 14214 | 24214 | AAUUUUCCUUGAAAGAUCCUUUCAAGGAAAAU |
| | | | U |
| 565 | 14215 | 24215 | UGAAAUUGUAUUUUAUCUGAAAAUACAAUUUC |
| | | | A |
| 566 | 14216 | 24216 | AGUAAUUUCAAAAUUCUUAAUUUUGAAAUUAC |
| | | | U |
| 567 | 14217 | 24217 | CAAAAUUCUUAAAGUUCUUCUUUAAGAAUUUU |
| | | | G |
| 568 | 14218 | 24218 | UGAAUUUUGGUUCUGCUCUAGAACCAAAAUU |
| | | | CA |
| 569 | 14219 | 24219 | UGUCAUUUUAUAAUUAUGUAUUAUAAAAUGAC |
| | | | A |
| 570 | 14220 | 24220 | CCAAAUCCUGUACUGACAAAGUACAGGAUUU |
| | | | GG |
| 571 | 14221 | 24221 | GGAUAACUUUUAAUAGAGAAUUAAAAGUUAUC |
| | | | C |
| 572 | 14222 | 24222 | UUUAAGUCUUCUCUUAUUCAGAGAAGACUUA |
| | | | AA |
| 573 | 14223 | 24223 | GAUAAUUCCAAUAUGAUCAAUAUUGGAAUUAU |
| | | | C |
| 574 | 14224 | 24224 | GGAUAAAUGAACAUGGCCUAUGUUCAUUUAU |
| | | | CC |
| 575 | 14225 | 24225 | CAAGGUUCAUCAUUUUCUUAAUGAUGAACCU |
| | | | UG |
| 576 | 14226 | 24226 | UGGAAGUGCUAUAAAACAUUUAUAGCACUUC |
| | | | CA |
| 577 | 14227 | 24227 | CCAAGUACUCUUAAAGCAAUUAAGAGUACUUG |
| | | | G |
| 578 | 14228 | 24228 | UCCAAUGAUUUCCUGUUUCAGGAAAUCAUUG |
| | | | GA |
| 579 | 14229 | 24229 | UAUGGUAUAUUCAUUUCCAAUGAAUAUACCAU |
| | | | A |
| 580 | 14230 | 24230 | GAACAAGAUGAACUUCCCAAGUUCAUCUUGU |
| | | | UC |
| 581 | 14231 | 24231 | UGAACUUCAGGAAUUUUAGAUUCCUGAAGUU |
| | | | CA |
| 582 | 14232 | 24232 | AAGUCUUCUCUUAUUCCAAAUAAGAGAAGACU |
| | | | U |
| 583 | 14233 | 24233 | GAAUGUUUAUACUUUGAUAAAGUAUAAACAUU |
| | | | C |
| 584 | 14234 | 24234 | CCGGAAUCGUACACAAAGGGUGUACGAUUCC |
| | | | GG |
| 585 | 14235 | 24235 | CAUACCUCUGCUCUUCUGAAGAGCAGAGGUA |
| | | | UG |
| 586 | 14236 | 24236 | GAUCAAUUUCUUCUACCAUAGAAGAAAUUGAU |
| | | | C |
| 587 | 14237 | 24237 | CAACAUUGUGUUUUGCAUUAAAACACAAUGUU |
| | | | G |
| 588 | 14238 | 24238 | UAACUUUAUAAGCAUAUGCUGCUUAUAAAGUU |
| | | | A |
| 589 | 14239 | 24239 | CAGGAUAACUUUUAAUAGAUAAAAGUUAUCCU |
| | | | G |
| 590 | 14240 | 24240 | UUUUAUUGGUUGAUACUGUAUCAACCAAUAAA |
| | | | A |
| 591 | 14241 | 24241 | UGCAACUGUUUUCUUCUGGAGAAAACAGUUG |
| | | | CA |
| 592 | 14242 | 24242 | UGCUUUGAUACAACUUCCAGUUGUAUCAAAG |
| | | | CA |
| 593 | 14243 | 24243 | CCAAAGCUUCUCUCUUCAAGAGAGAAGCUUU |
| | | | GG |
| 594 | 14244 | 24244 | GGGAACUCCUUUCGUCUGCCGAAAGGAGUUC |
| | | | CC |
| 595 | 14245 | 24245 | UAUGACAGUUCUUUGACUGAAAGAACUGUCA |
| | | | UA |
| 596 | 14246 | 24246 | UUGCAGAAUAACAUGUCCAAUGUUAUUCUGC |
| | | | AA |
| 597 | 14247 | 24247 | CAGAAGUCCUAUAGUUGUACUAUAGGACUUC |
| | | | UG |
| 598 | 14248 | 24248 | GAUAACUUUUAAUAGAGAUUAUUAAAAGUUAU |
| | | | C |
| 599 | 14249 | 24249 | ACUAAGAUUUCUUUUCCAAAAAGAAAUCUUAG |
| | | | U |
| 600 | 14250 | 24250 | GAUAAAUGAACAUGGCCUGCAUGUUCAUUUA |
| | | | UC |
| 601 | 14251 | 24251 | GAUGAACAUGUUGUGUCUCACAACAUGUUCA |
| | | | UC |
| 602 | 14252 | 24252 | UGAUCAUCUUUUAAGUCUUUUAAAAGAUGAU |
| | | | CA |
| 603 | 14253 | 24253 | GAGCAAUUCCAUUUAUCAAAAAUGGAAUUGCU |
| | | | C |
| 604 | 14254 | 24254 | UGUGAAUUUUCCUUGAAAGAAGGAAAAUUCA |
| | | | CA |
| 605 | 14255 | 24255 | UCAAAAUUCUUAAAGUUCUUUUAAGAAUUUUG |
| | | | A |
| 606 | 14256 | 24256 | UAAACUCCAGCACCGUCACGGUGCUGGAGUU |
| | | | UA |
| 607 | 14257 | 24257 | UUGAUAUUGGAAGUGCUAUACUUCCAAUAUC |
| | | | AA |
| 608 | 14258 | 24258 | GUGCAUUCAGUGUUACUGGAACACUGAAUGC |
| | | | AC |
| 609 | 14259 | 24259 | AAUGUUUAUACUUUGAUAAAAAGUAUAAACAU |
| | | | U |
| 610 | 14260 | 24260 | AAAUUGUAUUUUAUCUGGAAUAAAAUACAAUU |
| | | | U |
| 611 | 14261 | 24261 | UAAGUCUUCUCUUAUUCCAUAAGAGAAGACU |
| | | | UA |
| 612 | 14262 | 24262 | AGAAGUCCUAUAGUUGUAAACUAUAGGACUU |
| | | | CU |
| 613 | 14263 | 24263 | CUUGCUUUUAUAGUAAUUUACUAUAAAAGCAA |
| | | | G |
| 614 | 14264 | 24264 | UCAACAUUGUGUUUUGCAUAAACACAAUGUU |
| | | | GA |
| 615 | 14265 | 24265 | AGGCAGUUGUUUCUACCAUAGAAACAACUGC |
| | | | CU |
| 616 | 14266 | 24266 | UAUGAUCAAUUUCUUCUACAGAAAUUGAUCAU |
| | | | A |
| 617 | 14267 | 24267 | GUAAUUUCAAAAUUCUUAAAAUUUUGAAAUUA |
| | | | C |
| 618 | 14268 | 24268 | AUCAACAUUGUGUUUUGCAAACACAAUGUUG |
| | | | AU |
| 619 | 14269 | 24269 | CAAAGUAUUCCCAAAAGGCUUGGGAAUACUU |
| | | | UG |
| 620 | 14270 | 24270 | AAAACAUGGUACACUGUUUGUGUACCAUGUU |
| | | | UU |
| 621 | 14271 | 24271 | ACACAGAACUGCAUCCCAGAUGCAGUUCUGU |
| | | | GU |
| 622 | 14272 | 24272 | UCCAAGUACUCUUAAAGCAUAAGAGUACUUG |
| | | | GA |
| 623 | 14273 | 24273 | UGUAGUAUGACAGUUCUUUACUGUCAUACUA |
| | | | CA |
| 624 | 14274 | 24274 | CAGAAUAGCUUUCCCUUUUGGAAAGCUAUUC |
| | | | UG |
| 625 | 14275 | 24275 | GCUUUUAUAGUAAUUUCAAAUUACUAUAAAAG |
| | | | C |
| 626 | 14276 | 24276 | GAAGCUACUCCAUCAUCAAGAUGGAGUAGCU |
| | | | UC |
| 627 | 14277 | 24277 | UGCCACUAAUUCUAAGUAAUAGAAUUAGUGG |
| | | | CA |
| 628 | 14278 | 24278 | GUAGACUCUAUGACUGUUAGUCAUAGAGUCU |
| | | | AC |
| 629 | 14279 | 24279 | CUAAGAUUUCUUUUCCAAAAAAAGAAAUCUUA |
| | | | G |
| 630 | 14280 | 24280 | CAAUAUUUAACCAGACUGACUGGUUAAAUAUU |
| | | | G |
| 631 | 14281 | 24281 | UAGUAAUUUCAAAAUUCUUUUUUGAAAUUACU |
| | | | A |
| 632 | 14282 | 24282 | GGAAAAGAGAUAAUUCCAAAUUAUCUCUUUUC |
| | | | C |
| 633 | 14283 | 24283 | AAAAUGCUUGACACGAUGAGUGUCAAGCAUU |
| | | | UU |
| 634 | 14284 | 24284 | UAUAUUCAUUUCCAGGAAGUGGAAAUGAAUA |
| | | | UA |
| 635 | 14285 | 24285 | UAAUAAAAGCAAGUGCCACACUUGCUUUUAUU |
| | | | A |
| 636 | 14286 | 24286 | UACUAUGCGUUUGUAAUCAACAAACGCAUAG |
| | | | UA |
| 637 | 14287 | 24287 | GAAUUGAAAUACUCUUUCCGAGUAUUUCAAU |
| | | | UC |
| 638 | 14288 | 24288 | UCAGGAUAACUUUUAAUAGAAAAGUUAUCCUG |
| | | | A |
| 639 | 14289 | 24289 | UACAACUUCCAAAUACACAAUUUGGAAGUUGU |
| | | | A |
| 640 | 14290 | 24290 | AAUCAUUCUCUAAUAAAAGAUUAGAGAAUGAU |
| | | | U |
| 641 | 14291 | 24291 | GAAUAGCUUUCCCUUUUGAAGGGAAAGCUAU |
| | | | UC |
| 642 | 14292 | 24292 | GGAAAUUCUUGUCUGUCAUAGACAAGAAUUU |
| | | | CC |
| 643 | 14293 | 24293 | UUGAAUUUUGGUUCUGCUCGAACCAAAAUUC |
| | | | AA |
| 644 | 14294 | 24294 | AGUGAGCUUUACAAAUAAGUUGUAAAGCUCA |
| | | | CU |
| 645 | 14295 | 24295 | AAACAUGGUACACUGUUUAAGUGUACCAUGU |
| | | | UU |
| 646 | 14296 | 24296 | UAGACUCUAUGACUGUUACAGUCAUAGAGUC |
| | | | UA |
| 647 | 14297 | 24297 | UUUUCUUGGGAGUCAUCUGGACUCCCAAGAA |
| | | | AA |
| 648 | 14298 | 24298 | GUAGGCAAGGAGAUGUCCAAUCUCCUUGCCU |
| | | | AC |
| 649 | 14299 | 24299 | AAAGCCACCUCCAUACCUCAUGGAGGUGGCU |
| | | | UU |
| 650 | 14300 | 24300 | UAAGAUUUCUUUUCCAAACGAAAAGAAAUCUU |
| | | | A |
| 651 | 14301 | 24301 | AAAGCUGCAAACUUCCUCAAAGUUUGCAGCU |
| | | | UU |
| 652 | 14302 | 24302 | UCUAAUAAAAGCAAGUGCCUUGCUUUUAUUA |
| | | | GA |
| 653 | 14303 | 24303 | CAAUUGUUUGUGCAUUCAGUGCACAAACAAU |
| | | | UG |
| 654 | 14304 | 24304 | ACCAAAGCUUCUCUCUUCAAGAGAAGCUUUG |
| | | | GU |
| 655 | 14305 | 24305 | GCAACUGUUUUCUUCUGGGAAGAAAACAGUU |
| | | | GC |
| 656 | 14306 | 24306 | AUGCUUUGAUACAACUUCCUUGUAUCAAAGC |
| | | | AU |
| 657 | 14307 | 24307 | AAUUCAUCUAAAUUAGCUAAAUUUAGAUGAAU |
| | | | U |
| 658 | 14308 | 24308 | UGUGACGAUGUAAUAGACCAUUACAUCGUCA |
| | | | CA |
| 659 | 14309 | 24309 | GGUACACUGUUUAUCUGGUAUAAACAGUGUA |
| | | | CC |
| 660 | 14310 | 24310 | GGUUGCCUUGUACUUGACAAGUACAAGGCAA |
| | | | CC |
| 661 | 14311 | 24311 | CCAAGGAAAUUCUUGUCUGAAGAAUUUCCUU |
| | | | GG |
| 662 | 14312 | 24312 | UUAACCAGACUGAAUCAGAUUCAGUCUGGUU |
| | | | AA |
| 663 | 14313 | 24313 | UAGCAGCUAUUUCUUCUAUAGAAAUAGCUGC |
| | | | UA |
| 664 | 14314 | 24314 | CCAGUUUUGUAGAUAUCCAAUCUACAAAACUG |
| | | | G |
| 665 | 14315 | 24315 | AAUGAUUUCCUGUUUCCAGAACAGGAAAUCA |
| | | | UU |
| 666 | 14316 | 24316 | AGACAAGAUCUCACCUACAGUGAGAUCUUGU |
| | | | CU |
| 667 | 14317 | 24317 | GUGGAUUACCUUUAACCAAUAAAGGUAAUCCA |
| | | | C |
| 668 | 14318 | 24318 | UGAUACUGUGAAUUUUCCUAAUUCACAGUAU |
| | | | CA |
| 669 | 14319 | 24319 | AAUACUGGGACAACGCUCAGUUGUCCCAGUA |
| | | | UU |
| 670 | 14320 | 24320 | CAUAAUUAAGUACUGUCUUAGUACUUAAUUAU |
| | | | G |
| 671 | 14321 | 24321 | CAAACUUCCUCAGAGGUACUCUGAGGAAGUU |
| | | | UG |
| 672 | 14322 | 24322 | AAGGCCAUGUUAUUUCAGAAAUAACAUGGCC |
| | | | UU |
| 673 | 14323 | 24323 | UGCAAACUGUAUGCAGCUGGCAUACAGUUUG |
| | | | CA |
| 674 | 14324 | 24324 | AGAAUAGCUUUCCCUUUUGGGGAAAGCUAUU |
| | | | CU |
| 675 | 14325 | 24325 | UACUGUGAAUUUUCCUUGAGAAAAUUCACAG |
| | | | UA |
| 676 | 14326 | 24326 | CCAACUUCAAAGAGUUCAACUCUUUGAAGUU |
| | | | GG |
| 677 | 14327 | 24327 | CUGAAUUUUGAUAUUGGAAAUAUCAAAAUUCA |
| | | | G |
| 678 | 14328 | 24328 | AAAGGCUGUAAGAUAUAAGAUCUUACAGCCU |
| | | | UU |
| 679 | 14329 | 24329 | UUGCUUUUAUAGUAAUUUCUACUAUAAAAGCA |
| | | | A |
| 680 | 14330 | 24330 | GUCCAAGUACUCUUAAAGCAAGAGUACUUGG |
| | | | AC |
| 681 | 14331 | 24331 | ACACUAAUUCUGCUGUCUGAGCAGAAUUAGU |
| | | | GU |
| 682 | 14332 | 24332 | CUGGCUUGCUUACUGGUAAAGUAAGCAAGCC |
| | | | AG |
| 683 | 14333 | 24333 | GUUGCCUUGUACUUGACAAAAGUACAAGGCA |
| | | | AC |
| 684 | 14334 | 24334 | CAGCAUUUCUGUAGGACAUCUACAGAAAUGC |
| | | | UG |
| 685 | 14335 | 24335 | UUAUACUUUGAUAAGAUGCUUAUCAAAGUAUA |
| | | | A |
| 686 | 14336 | 24336 | UUAAGUACUGUCUUCCUUUAAGACAGUACUU |
| | | | AA |
| 687 | 14337 | 24337 | CUGCAAACUUCCUCAGAGGGAGGAAGUUUGC |
| | | | AG |
| 688 | 14338 | 24338 | AAGACAGUUUCUCUUUUGGAGAGAAACUGUC |
| | | | UU |
| 689 | 14339 | 24339 | AUUCAGUUUGUAGGGAGAGCCUACAAACUGA |
| | | | AU |
| 690 | 14340 | 24340 | UGGAAUGUUUAUACUUUGAGUAUAAACAUUC |
| | | | CA |
| 691 | 14341 | 24341 | UAACAGGGUCUUCAUGUGUUGAAGACCCUGU |
| | | | UA |
| 692 | 14342 | 24342 | AGAGAUUGUUGCAUCAAAUAUGCAACAAUCUC |
| | | | U |
| 693 | 14343 | 24343 | GAGUCAUCUGCAUUUGCAUAAUGCAGAUGAC |
| | | | UC |
| 694 | 14344 | 24344 | GAAUGUUUAUAUUUAGCAGAAAUAUAAACAUU |
| | | | C |
| 695 | 14345 | 24345 | GGAACAAGAUGAACUUCCCGUUCAUCUUGUU |
| | | | CC |
| 696 | 14346 | 24346 | GGUAUUUCUGCCUCUUCAGGAGGCAGAAAUA |
| | | | CC |
| 697 | 14347 | 24347 | CAGAACUGCAUCCCAGAAGGGGAUGCAGUUC |
| | | | UG |
| 698 | 14348 | 24348 | UUCCGGUGUCCAAUAACCUAUUGGACACCGG |
| | | | AA |
| 699 | 14349 | 24349 | CAUCAAUUGUUUGUGCAUUACAAACAAUUGAU |
| | | | G |
| 700 | 14350 | 24350 | AAUACUCUUUCCAAGGGCUUUGGAAAGAGUA |
| | | | UU |
| 701 | 14351 | 24351 | UCAAAUGCUUCAGUGUAUCACUGAAGCAUUU |
| | | | GA |
| 702 | 14352 | 24352 | AAGCAAGUGCCACUAAUUCAGUGGCACUUGC |
| | | | UU |
| 703 | 14353 | 24353 | UUAAUAGAGAUUGUUGCAUACAAUCUCUAUUA |
| | | | A |
| 704 | 14354 | 24354 | AUAGAGAUUGUUGCAUCAAGCAACAAUCUCUA |
| | | | U |
| 705 | 14355 | 24355 | GAACUCCUUUCGUCUGCUAGACGAAAGGAGU |
| | | | UC |
| 706 | 14356 | 24356 | GUCAUUUUAUAAUUAUGUAAAUUAUAAAAUGA |
| | | | C |
| 707 | 14357 | 24357 | AAGAAUUGAAAUACUCUUUGUAUUUCAAUUCU |
| | | | U |
| 708 | 14358 | 24358 | AAAGCCUUUCUAAUUCCAAAUUAGAAAGGCUU |
| | | | U |
| 709 | 14359 | 24359 | UCAAUAUUUAACCAGACUGUGGUUAAAUAUU |
| | | | GA |
| 710 | 14360 | 24360 | UGGUAUAUUCAUUUCCAGGAAAUGAAUAUAC |
| | | | CA |
| 711 | 14361 | 24361 | UGAAACAAUUGAACGAAACGUUCAAUUGUUUC |
| | | | A |
| 712 | 14362 | 24362 | AAUAUCUUGCUUUUAUAGUAAAAGCAAGAUAU |
| | | | U |
| 713 | 14363 | 24363 | AGAGAUUGUCAGAUCCAAUAUCUGACAAUCU |
| | | | CU |
| 714 | 14364 | 24364 | AGCAAUUCCAUUUAUCAACUAAAUGGAAUUGC |
| | | | U |
| 715 | 14365 | 24365 | UUAUCAGGAUAACUUUUAAAGUUAUCCUGAUA |
| | | | A |
| 716 | 14366 | 24366 | CGAAUUUCUGGCUUGCUUAAAGCCAGAAAUU |
| | | | CG |
| 717 | 14367 | 24367 | UCAAGUUCAGACUGGUGAGCAGUCUGAACUU |
| | | | GA |
| 718 | 14368 | 24368 | AGAGGUACUGGUUUUGUGAAAACCAGUACCU |
| | | | CU |
| 719 | 14369 | 24369 | GGUAUUUUCUUUCAAGCAAUGAAAGAAAAUAC |
| | | | C |
| 720 | 14370 | 24370 | AGGUACUGGUUUUGUGAACCAAAACCAGUAC |
| | | | CU |
| 721 | 14371 | 24371 | CAGAUUCCCUCCACAGCAGGUGGAGGGAAUC |
| | | | UG |
| 722 | 14372 | 24372 | UAGUCAGCAUUUCUGUAGGAGAAAUGCUGAC |
| | | | UA |
| 723 | 14373 | 24373 | AUUAGCACGGAGCUGGCUUAGCUCCGUGCUA |
| | | | AU |
| 724 | 14374 | 24374 | UAAGAGACACAGUUUGGCCAACUGUGUCUCU |
| | | | UA |
| 725 | 14375 | 24375 | GAACAUGUUGUGUCUCUAGGACACAACAUGU |
| | | | UC |
| 726 | 14376 | 24376 | CAUAAGUGCAAACUGUAUGAGUUUGCACUUA |
| | | | UG |
| 727 | 14377 | 24377 | CAAAUUCAGUUUGUAGGGAACAAACUGAAUU |
| | | | UG |
| 728 | 14378 | 24378 | ACAAGCAGUCCUUUUACACAAAGGACUGCUU |
| | | | GU |
| 729 | 14379 | 24379 | AAGUAUUCCCAAAAGGCCCUUUUGGGAAUAC |
| | | | UU |
| 730 | 14380 | 24380 | CAAUCACAGUAAAGGCUGUCUUUACUGUGAU |
| | | | UG |
| 731 | 14381 | 24381 | AAUAGCUUUCCCUUUUGACAAGGGAAAGCUA |
| | | | UU |
| 732 | 14382 | 24382 | UAUUGGUUGAUACUGUGAAAGUAUCAACCAA |
| | | | UA |
| 733 | 14383 | 24383 | CAGAAAUGGCCAAUGUAAAAUUGGCCAUUUC |
| | | | UG |
| 734 | 14384 | 24384 | UUGUAAUCAGAGUUUCCGUAACUCUGAUUAC |
| | | | AA |
| 735 | 14385 | 24385 | ACUCAGGCUUUAAUGAUCAAUUAAAGCCUGA |
| | | | GU |
| 736 | 14386 | 24386 | CAGCUAUUUCUUCUAUCUUAGAAGAAAUAGC |
| | | | UG |
| 737 | 14387 | 24387 | AUAUCUUGCUUUUAUAGUAUAAAAGCAAGAUA |
| | | | U |
| 738 | 14388 | 24388 | ACAAGGUUCAUCAUUUUCUAUGAUGAACCUU |
| | | | GU |
| 739 | 14389 | 24389 | AUUGUGUUUUGCAUUGCUGAUGCAAAACACA |
| | | | AU |
| 740 | 14390 | 24390 | GCCACAAUAAAGAAUUACAUUCUUUAUUGUG |
| | | | GC |
| 741 | 14391 | 24391 | GGUGGAUUACCUUUAACCAAAAGGUAAUCCA |
| | | | CC |
| 742 | 14392 | 24392 | CUUCUCUCUUCAAAGCUGAUUUGAAGAGAGA |
| | | | AG |
| 743 | 14393 | 24393 | UGGGAUGCUUCAAUAUCCUAUUGAAGCAUCC |
| | | | CA |
| 744 | 14394 | 24394 | AAAUCUUCUAAACUGUAGUAGUUUAGAAGAUU |
| | | | U |
| 745 | 14395 | 24395 | AAAUUCAGUUUGUAGGGAGUACAAACUGAAU |
| | | | UU |
| 746 | 14396 | 24396 | CUGUCAUUUUAUAAUUAUGUUAUAAAAUGACA |
| | | | G |
| 747 | 14397 | 24397 | AAUGCUUUGAUACAACUUCUGUAUCAAAGCAU |
| | | | U |
| 748 | 14398 | 24398 | UCCUCUUUAUAUUUAGCCUAAAUAUAAAGAGG |
| | | | A |
| 749 | 14399 | 24399 | GCAAAUUCAUCUAAAUUAGUUAGAUGAAUUUG |
| | | | C |
| 750 | 14400 | 24400 | UUCCAAAUACACAUAAGAAAUGUGUAUUUGGA |
| | | | A |

[0386] Tables 3a to c below show 100 antisense sequences, sense sequences and hairpins of the disclosure, respectively; with full modification information (modified sugars and, where applicable, modified phosphates).

TABLE 3a
Modified antisense constructs

| SEQ | Anti- | |
|---|---|---|
| ID | sense | |
| NO | ID | Modified 19 mer Antisense |
| 751 | 24151 | [5Phos][mU][Ps][fC][Ps][mA][fC][mA][fG][mU][fU][mU][fG][mG][fC][mC][fU][Ps][mG] |
| | | [Ps][fG][Ps][mA][Ps][fG][Ps][mA] |
| 752 | 24152 | [5Phos][mU][Ps][fG][Ps][mA][fA][mU][fC][mU][fU][mG][fA][mA][fG][mU][fC][Ps][mA] |
| | | [Ps][fG][Ps][mG][Ps][fA][Ps][mA] |
| 753 | 24153 | [5Phos][mU][Ps][fU][Ps][mG][fG][mG][fC][mU][fU][mG][fU][mA][fG][mC][fU][Ps][mG] |
| | | [Ps][fG][Ps][mC][Ps][fA][Ps][mC] |
| 754 | 24154 | [5Phos][mU][Ps][fC][Ps][mA][fA][mG][fU][mA][fA][mU][fU][mA][fU][mA][fG][Ps][mU] |
| | | [Ps][fG][Ps][mA][Ps][fG][Ps][mU] |
| 755 | 24155 | [5Phos][mU][Ps][fA][Ps][mA][fC][mA][fG][mG][fU][mU][fU][mG][fU][mC][fU][Ps][mG] |
| | | [Ps][fU][Ps][mA][Ps][fU][Ps][mG] |
| 756 | 24156 | [5Phos][mU][Ps][fC][Ps][mA][fG][mA][fC][mA][fU][mU][fU][mU][fA][mA][fC][Ps][mA] |
| | | [Ps][fC][Ps][mA][Ps][fG][Ps][mA] |
| 757 | 24157 | [5Phos][mU][Ps][fC][Ps][mC][fU][mG][fG][mA][fG][mC][fU][mG][fG][mU][fU][Ps][mG] |
| | | [Ps][fC][Ps][mC][Ps][fA][Ps][mC] |
| 758 | 24158 | [5Phos][mU][Ps][fA][Ps][mU][fA][mA][fA][mA][fU][mC][fA][mA][fG][mU][fA][Ps][mA] |
| | | [Ps][fU][Ps][mU][Ps][fA][Ps][mU] |
| 759 | 24159 | [5Phos][mU][Ps][fA][Ps][mC][fA][mC][fA][mG][fU][mU][fU][mG][fG][mC][fC][Ps][mU] |
| | | [Ps][fG][Ps][mG][Ps][fA][Ps][mG] |
| 760 | 24160 | [5Phos][mU][Ps][fG][Ps][mG][fA][mA][fU][mC][fU][mU][fG][mA][fA][mG][fU][Ps][mC] |
| | | [Ps][fA][Ps][mG][Ps][fG][Ps][mA] |
| 761 | 24161 | [5Phos][mU][Ps][fG][Ps][mA][fC][mA][fU][mU][fU][mU][fA][mA][fC][mA][fC][Ps][mA] |
| | | [Ps][fG][Ps][mA][Ps][fA][Ps][mC] |
| 762 | 24162 | [5Phos][mU][Ps][fG][Ps][mA][fA][mG][fU][mC][fA][mG][fG][mA][fA][mA][fA][Ps][mG] |
| | | [Ps][fA][Ps][mG][Ps][fA][Ps][mU] |
| 763 | 24163 | [5Phos][mU][Ps][fA][Ps][mC][fA][mG][fU][mU][fU][mG][fG][mC][fC][mU][fG][Ps][mG] |
| | | [Ps][fA][Ps][mG][Ps][fA][Ps][mA] |
| 764 | 24164 | [5Phos][mU][Ps][fA][Ps][mU][fU][mA][fU][mA][fG][mU][fG][mA][fG][mU][fU][Ps][mA] |
| | | [Ps][fU][Ps][mU][Ps][fU][Ps][mU] |
| 765 | 24165 | [5Phos][mU][Ps][fC][Ps][mC][fA][mA][fG][mU][fC][mA][fG][mA][fU][mG][fU][Ps][mC] |
| | | [Ps][fU][Ps][mC][Ps][fU][Ps][mU] |
| 766 | 24166 | [5Phos][mU][Ps][fC][Ps][mA][fG][mG][fA][mA][fA][mA][fG][mA][fG][mA][fU][Ps][mA] |
| | | [Ps][fA][Ps][mU][Ps][fU][Ps][mC] |
| 767 | 24167 | [5Phos][mU][Ps][fG][Ps][mC][fA][mA][fG][mA][fC][mA][fU][mA][fU][mU][fC][Ps][mU] |
| | | [Ps][fU][Ps][mU][Ps][fA][Ps][mA] |
| 768 | 24168 | [5Phos][mU][Ps][fA][Ps][mA][fG][mG][fC][mC][fA][mA][fU][mU][fU][mC][fC][Ps][mA] |
| | | [Ps][fG][Ps][mA][Ps][fG][Ps][mG] |
| 769 | 24169 | [5Phos][mU][Ps][fA][Ps][mA][fG][mU][fA][mA][fU][mU][fA][mU][fA][mG][fU][Ps][mG] |
| | | [Ps][fA][Ps][mG][Ps][fU][Ps][mU] |
| 770 | 24170 | [5Phos][mU][Ps][fU][Ps][mA][fA][mA][fA][mU][fC][mA][fA][mG][fU][mA][fA][Ps][mU] |
| | | [Ps][fU][Ps][mA][Ps][fU][Ps][mA] |
| 771 | 24171 | [5Phos][mU][Ps][fU][Ps][mC][fA][mA][fG][mU][fA][mA][fU][mU][fA][mU][fA][Ps][mG] |
| | | [Ps][fU][Ps][mG][Ps][fA][Ps][mG] |
| 772 | 24172 | [5Phos][mU][Ps][fC][Ps][mC][fA][mA][fU][mU][fU][mC][fC][mA][fG][mA][fG][Ps][mG] |
| | | [Ps][fA][Ps][mA][Ps][fG][Ps][mC] |
| 773 | 24173 | [5Phos][mU][Ps][fG][Ps][mU][fA][mA][fU][mU][fA][mU][fA][mG][fU][mG][fA][Ps][mG] |
| | | [Ps][fU][Ps][mU][Ps][fA][Ps][mU] |
| 774 | 24174 | [5Phos][mU][Ps][fA][Ps][mA][fA][mG][fG][mU][fA][mC][fU][mU][fG][mU][fU][Ps][mG] |
| | | [Ps][fU][Ps][mU][Ps][fU][Ps][mA] |
| 775 | 24175 | [5Phos][mU][Ps][fA][Ps][mC][fU][mG][fC][mU][fG][mU][fU][mU][fC][mA][fG][Ps][mA] |
| | | [Ps][fA][Ps][mU][Ps][fC][Ps][mA] |
| 776 | 24176 | [5Phos][mU][Ps][fC][Ps][mU][fG][mC][fU][mG][fU][mU][fU][mC][fA][mG][fA][Ps][mA] |
| | | [Ps][fU][Ps][mC][Ps][fA][Ps][mA] |
| 777 | 24177 | [5Phos][mU][Ps][fU][Ps][mA][fU][mA][fA][mA][fG][mG][fU][mA][fC][mU][fU][Ps][mG] |
| | | [Ps][fU][Ps][mU][Ps][fG][Ps][mU] |
| 778 | 24178 | [5Phos][mU][Ps][fG][Ps][mU][fA][mA][fA][mC][fA][mG][fU][mU][fC][mC][fU][Ps][mU] |
| | | [Ps][fU][Ps][mC][Ps][fA][Ps][mA] |
| 779 | 24179 | [5Phos][mU][Ps][fG][Ps][mU][fA][mA][fC][mU][fU][mU][fG][mG][fC][mU][fG][Ps][mA] |
| | | [Ps][fG][Ps][mA][Ps][fG][Ps][mA] |
| 780 | 24180 | [5Phos][mU][Ps][fA][Ps][mU][fA][mG][fU][mU][fG][mU][fA][mA][fA][mC][fA][Ps][mG] |
| | | [Ps][fU][Ps][mU][Ps][fC][Ps][mC] |
| 781 | 24181 | [5Phos][mU][Ps][fC][Ps][mA][fU][mA][fU][mU][fC][mU][fU][mU][fA][mA][fC][Ps][mU] |
| | | [Ps][fA][Ps][mC][Ps][fU][Ps][mC] |
| 782 | 24182 | [5Phos][mU][Ps][fA][Ps][mG][fC][mA][fG][mU][fC][mC][fU][mU][fU][mU][fA][Ps][mC] |
| | | [Ps][fA][Ps][mC][Ps][fU][Ps][mC] |
| 783 | 24183 | [5Phos][mU][Ps][fA][Ps][mG][fU][mG][fA][mG][fU][mU][fA][mU][fU][mU][fU][Ps][mG] |
| | | [Ps][fU][Ps][mC][Ps][fA][Ps][mA] |
| 784 | 24184 | [5Phos][mU][Ps][fG][Ps][mG][fA][mA][fG][mA][fC][mA][fU][mC][fU][mU][fU][Ps][mG] |
| | | [Ps][fA][Ps][mA][Ps][fC][Ps][mA] |
| 785 | 24185 | [5Phos][mU][Ps][fC][Ps][mA][fG][mU][fC][mC][fU][mU][fU][mU][fA][mC][fA][Ps][mC] |
| | | [Ps][fU][Ps][mC][Ps][fA][Ps][mA] |
| 786 | 24186 | [5Phos][mU][Ps][fG][Ps][mU][fU][mA][fU][mU][fU][mU][fG][mU][fC][mA][fA][Ps][mU] |
| | | [Ps][fA][Ps][mU][Ps][fA][Ps][mU] |
| 787 | 24187 | [5Phos][mU][Ps][fU][Ps][mA][fC][mA][fA][mC][fA][mG][fA][mA][fU][mA][fU][Ps][mG] |
| | | [Ps][fG][Ps][mU][Ps][fA][Ps][mU] |
| 788 | 24188 | [5Phos][mU][Ps][fU][Ps][mU][fA][mU][fU][mU][fU][mG][fU][mC][fA][mA][fU][Ps][mA] |
| | | [Ps][fU][Ps][mA][Ps][fU][Ps][mG] |
| 789 | 24189 | [5Phos][mU][Ps][fA][Ps][mG][fG][mC][fU][mU][fC][mA][fG][mG][fA][mA][fA][Ps][mA] |
| | | [Ps][fG][Ps][mA][Ps][fG][Ps][mG] |
| 790 | 24190 | [5Phos][mU][Ps][fG][Ps][mG][fA][mA][fA][mA][fG][mA][fG][mA][fU][mA][fA][Ps][mU] |
| | | [Ps][fU][Ps][mC][Ps][fC][Ps][mA] |
| 791 | 24191 | [5Phos][mU][Ps][fG][Ps][mU][fU][mA][fC][mA][fG][mC][fA][mA][fU][mA][fU][Ps][mA] |
| | | [Ps][fA][Ps][mA][Ps][fG][Ps][mG] |
| 792 | 24192 | [5Phos][mU][Ps][fA][Ps][mU][fA][mA][fG][mC][fA][mU][fA][mU][fG][mC][fA][Ps][mA] |
| | | [Ps][fU][Ps][mC][Ps][fU][Ps][mC] |
| 793 | 24193 | [5Phos][mU][Ps][fA][Ps][mU][fA][mU][fU][mC][fU][mU][fU][mA][fA][mC][fU][Ps][mU] |
| | | [Ps][fC][Ps][mA][Ps][fA][Ps][mA] |
| 794 | 24194 | [5Phos][mU][Ps][fA][Ps][mG][fA][mC][fA][mU][fC][mU][fU][mU][fG][mA][fA][Ps][mC] |
| | | [Ps][fA][Ps][mC][Ps][fC][Ps][mU] |
| 795 | 24195 | [5Phos][mU][Ps][fC][Ps][mA][fG][mG][fA][mA][fG][mA][fC][mA][fU][mC][fU][Ps][mU] |
| | | [Ps][fU][Ps][mG][Ps][fA][Ps][mA] |
| 796 | 24196 | [5Phos][mU][Ps][fA][Ps][mC][fA][mG][fC][mA][fA][mU][fA][mU][fA][mA][fA][Ps][mG] |
| | | [Ps][fG][Ps][mU][Ps][fA][Ps][mC] |
| 797 | 24197 | [5Phos][mU][Ps][fA][Ps][mU][fU][mG][fU][mC][fA][mU][fA][mG][fG][mU][fU][Ps][mA] |
| | | [Ps][fU][Ps][mU][Ps][fG][Ps][mG] |
| 798 | 24198 | [5Phos][mU][Ps][fG][Ps][mA][fG][mU][fU][mA][fU][mU][fU][mU][fG][mU][fC][Ps][mA] |
| | | [Ps][fA][Ps][mU][Ps][fA][Ps][mU] |
| 799 | 24199 | [5Phos][mU][Ps][fG][Ps][mU][fG][mA][fG][mU][fU][mA][fU][mU][fU][mU][fG][Ps][mU] |
| | | [Ps][fC][Ps][mA][Ps][fA][Ps][mU] |
| 800 | 24200 | [5Phos][mU][Ps][fU][Ps][mG][fA][mG][fU][mU][fA][mU][fU][mU][fU][mG][fU][Ps][mC] |
| | | [Ps][fA][Ps][mA][Ps][fU][Ps][mA] |
| 801 | 24201 | [5Phos][mU][Ps][fA][Ps][mA][fU][mU][fU][mU][fC][mC][fU][mU][fG][mA][fA][Ps][mA] |
| | | [Ps][fG][Ps][mA][Ps][fU][Ps][mC] |
| 802 | 24202 | [5Phos][mU][Ps][fC][Ps][mU][fG][mU][fU][mA][fC][mA][fG][mC][fA][mA][fU][Ps][mA] |
| | | [Ps][fU][Ps][mA][Ps][fA][Ps][mA] |
| 803 | 24203 | [5Phos][mU][Ps][fA][Ps][mA][fU][mC][fC][mA][fU][mU][fG][mU][fC][mA][fU][Ps][mA] |
| | | [Ps][fG][Ps][mG][Ps][fU][Ps][mU] |
| 804 | 24204 | [5Phos][mU][Ps][fA][Ps][mU][fC][mC][fA][mU][fU][mG][fU][mC][fA][mU][fA][Ps][mG] |
| | | [Ps][fG][Ps][mU][Ps][fU][Ps][mA] |
| 805 | 24205 | [5Phos][mU][Ps][fA][Ps][mG][fA][mA][fA][mU][fC][mC][fA][mU][fU][mG][fU][Ps][mC] |
| | | [Ps][fA][Ps][mU][Ps][fA][Ps][mG] |
| 806 | 24206 | [5Phos][mU][Ps][fA][Ps][mG][fA][mC][fA][mU][fA][mU][fU][mC][fU][mU][fU][Ps][mA] |
| | | [Ps][fA][Ps][mC][Ps][fU][Ps][mU] |
| 807 | 24207 | [5Phos][mU][Ps][fA][Ps][mG][fU][mG][fC][mA][fG][mA][fU][mU][fC][mC][fC][Ps][mU] |
| | | [Ps][fC][Ps][mC][Ps][fA][Ps][mC] |
| 808 | 24208 | [5Phos][mU][Ps][fU][Ps][mC][fC][mA][fU][mU][fG][mU][fC][mA][fU][mA][fG][Ps][mG] |
| | | [Ps][fU][Ps][mU][Ps][fA][Ps][mU] |
| 809 | 24209 | [5Phos][mU][Ps][fG][Ps][mA][fC][mA][fU][mC][fU][mU][fU][mG][fA][mA][fC][Ps][mA] |
| | | [Ps][fC][Ps][mC][Ps][fU][Ps][mU] |
| 810 | 24210 | [5Phos][mU][Ps][fC][Ps][mA][fU][mU][fG][mU][fC][mA][fU][mA][fG][mG][fU][Ps][mU] |
| | | [Ps][fA][Ps][mU][Ps][fU][Ps][mG] |
| 811 | 24211 | [5Phos][mU][Ps][fG][Ps][mA][fA][mG][fA][mG][fA][mA][fA][mU][fC][mC][fA][Ps][mU] |
| | | [Ps][fU][Ps][mG][Ps][fU][Ps][mC] |
| 812 | 24212 | [5Phos][mU][Ps][fA][Ps][mC][fA][mU][fA][mU][fU][mC][fU][mU][fU][mA][fA][Ps][mC] |
| | | [Ps][fU][Ps][mU][Ps][fC][Ps][mA] |
| 813 | 24213 | [5Phos][mU][Ps][fA][Ps][mG][fU][mC][fC][mU][fU][mU][fU][mA][fC][mA][fC][Ps][mU] |
| | | [Ps][fC][Ps][mA][Ps][fA][Ps][mA] |
| 814 | 24214 | [5Phos][mU][Ps][fA][Ps][mU][fU][mU][fU][mC][fC][mU][fU][mG][fA][mA][fA][Ps][mG] |
| | | [Ps][fA][Ps][mU][Ps][fC][Ps][mC] |
| 815 | 24215 | [5Phos][mU][Ps][fG][Ps][mA][fA][mA][fU][mU][fG][mU][fA][mU][fU][mU][fU][Ps][mA] |
| | | [Ps][fU][Ps][mC][Ps][fU][Ps][mG] |
| 816 | 24216 | [5Phos][mU][Ps][fG][Ps][mU][fA][mA][fU][mU][fU][mC][fA][mA][fA][mA][fU][Ps][mU] |
| | | [Ps][fC][Ps][mU][Ps][fU][Ps][mA] |
| 817 | 24217 | [5Phos][mU][Ps][fA][Ps][mA][fA][mA][fU][mU][fC][mU][fU][mA][fA][mA][fG][Ps][mU] |
| | | [Ps][fU][Ps][mC][Ps][fU][Ps][mU] |
| 818 | 24218 | [5Phos][mU][Ps][fG][Ps][mA][fA][mU][fU][mU][fU][mG][fG][mU][fU][mC][fU][Ps][mG] |
| | | [Ps][fC][Ps][mU][Ps][fC][Ps][mU] |
| 819 | 24219 | [5Phos][mU][Ps][fG][Ps][mU][fC][mA][fU][mU][fU][mU][fA][mU][fA][mA][fU][Ps][mU] |
| | | [Ps][fA][Ps][mU][Ps][fG][Ps][mU] |
| 820 | 24220 | [5Phos][mU][Ps][fC][Ps][mA][fA][mA][fU][mC][fC][mU][fG][mU][fA][mC][fU][Ps][mG] |
| | | [Ps][fA][Ps][mC][Ps][fA][Ps][mA] |
| 821 | 24221 | [5Phos][mU][Ps][fG][Ps][mA][fU][mA][fA][mC][fU][mU][fU][mU][fA][mA][fU][Ps][mA] |
| | | [Ps][fG][Ps][mA][Ps][fG][Ps][mA] |
| 822 | 24222 | [5Phos][mU][Ps][fU][Ps][mU][fA][mA][fG][mU][fC][mU][fU][mC][fU][mC][fU][Ps][mU] |
| | | [Ps][fA][Ps][mU][Ps][fU][Ps][mC] |
| 823 | 24223 | [5Phos][mU][Ps][fA][Ps][mU][fA][mA][fU][mU][fC][mC][fA][mA][fU][mA][fU][Ps][mG] |
| | | [Ps][fA][Ps][mU][Ps][fC][Ps][mA] |
| 824 | 24224 | [5Phos][mU][Ps][fG][Ps][mA][fU][mA][fA][mA][fU][mG][fA][mA][fC][mA][fU][Ps][mG] |
| | | [Ps][fG][Ps][mC][Ps][fC][Ps][mU] |
| 825 | 24225 | [5Phos][mU][Ps][fA][Ps][mA][fG][mG][fU][mU][fC][mA][fU][mC][fA][mU][fU][Ps][mU] |
| | | [Ps][fU][Ps][mC][Ps][fU][Ps][mU] |
| 826 | 24226 | [5Phos][mU][Ps][fG][Ps][mG][fA][mA][fG][mU][fG][mC][fU][mA][fU][mA][fA][Ps][mA] |
| | | [Ps][fA][Ps][mC][Ps][fA][Ps][mU] |
| 827 | 24227 | [5Phos][mU][Ps][fC][Ps][mA][fA][mG][fU][mA][fC][mU][fC][mU][fU][mA][fA][Ps][mA] |
| | | [Ps][fG][Ps][mC][Ps][fA][Ps][mA] |
| 828 | 24228 | [5Phos][mU][Ps][fC][Ps][mC][fA][mA][fU][mG][fA][mU][fU][mU][fC][mC][fU][Ps][mG] |
| | | [Ps][fU][Ps][mU][Ps][fU][Ps][mC] |
| 829 | 24229 | [5Phos][mU][Ps][fA][Ps][mU][fG][mG][fU][mA][fU][mA][fU][mU][fC][mA][fU][Ps][mU] |
| | | [Ps][fU][Ps][mC][Ps][fC][Ps][mA] |
| 830 | 24230 | [5Phos][mU][Ps][fA][Ps][mA][fC][mA][fA][mG][fA][mU][fG][mA][fA][mC][fU][Ps][mU] |
| | | [Ps][fC][Ps][mC][Ps][fC][Ps][mA] |
| 831 | 24231 | [5Phos][mU][Ps][fG][Ps][mA][fA][mC][fU][mU][fC][mA][fG][mG][fA][mA][fU][Ps][mU] |
| | | [Ps][fU][Ps][mU][Ps][fA][Ps][mG] |
| 832 | 24232 | [5Phos][mU][Ps][fA][Ps][mG][fU][mC][fU][mU][fC][mU][fC][mU][fU][mA][fU][Ps][mU] |
| | | [Ps][fC][Ps][mC][Ps][fA][Ps][mA] |
| 833 | 24233 | [5Phos][mU][Ps][fA][Ps][mA][fU][mG][fU][mU][fU][mA][fU][mA][fC][mU][fU][Ps][mU] |
| | | [Ps][fG][Ps][mA][Ps][fU][Ps][mA] |
| 834 | 24234 | [5Phos][mU][Ps][fC][Ps][mG][fG][mA][fA][mU][fC][mG][fU][mA][fC][mA][fC][Ps][mA] |
| | | [Ps][fA][Ps][mA][Ps][fG][Ps][mG] |
| 835 | 24235 | [5Phos][mU][Ps][fA][Ps][mU][fA][mC][fC][mU][fC][mU][fG][mC][fU][mC][fU][Ps][mU] |
| | | [Ps][fC][Ps][mU][Ps][fG][Ps][mA] |
| 836 | 24236 | [5Phos][mU][Ps][fA][Ps][mU][fC][mA][fA][mU][fU][mU][fC][mU][fU][mC][fU][Ps][mA] |
| | | [Ps][fC][Ps][mC][Ps][fA][Ps][mU] |
| 837 | 24237 | [5Phos][mU][Ps][fA][Ps][mA][fC][mA][fU][mU][fG][mU][fG][mU][fU][mU][fU][Ps][mG] |
| | | [Ps][fC][Ps][mA][Ps][fU][Ps][mU] |
| 838 | 24238 | [5Phos][mU][Ps][fA][Ps][mA][fC][mU][fU][mU][fA][mU][fA][mA][fG][mC][fA][Ps][mU] |
| | | [Ps][fA][Ps][mU][Ps][fG][Ps][mC] |
| 839 | 24239 | [5Phos][mU][Ps][fA][Ps][mG][fG][mA][fU][mA][fA][mC][fU][mU][fU][mU][fA][Ps][mA] |
| | | [Ps][fU][Ps][mA][Ps][fG][Ps][mA] |
| 840 | 24240 | [5Phos][mU][Ps][fU][Ps][mU][fU][mA][fU][mU][fG][mG][fU][mU][fG][mA][fU][Ps][mA] |
| | | [Ps][fC][Ps][mU][Ps][fG][Ps][mU] |
| 841 | 24241 | [5Phos][mU][Ps][fG][Ps][mC][fA][mA][fC][mU][fG][mU][fU][mU][fU][mC][fU][Ps][mU] |
| | | [Ps][fU][Ps][mU][Ps][fG][Ps][mG] |
| 842 | 24242 | [5Phos][mU][Ps][fG][Ps][mC][fU][mU][fU][mG][fA][mU][fA][mC][fA][mA][fC][Ps][mU] |
| | | [Ps][fU][Ps][mC][Ps][fC][Ps][mA] |
| 843 | 24243 | [5Phos][mU][Ps][fC][Ps][mA][fA][mA][fG][mC][fU][mU][fC][mU][fC][mU][fC][Ps][mU] |
| | | [Ps][fU][Ps][mC][Ps][fA][Ps][mA] |
| 844 | 24244 | [5Phos][mU][Ps][fG][Ps][mG][fA][mA][fC][mU][fC][mC][fU][mU][fU][mC][fG][Ps][mU] |
| | | [Ps][fC][Ps][mU][Ps][fG][Ps][mC] |
| 845 | 24245 | [5Phos][mU][Ps][fA][Ps][mU][fG][mA][fC][mA][fG][mU][fU][mC][fU][mU][fU][Ps][mG] |
| | | [Ps][fA][Ps][mC][Ps][fU][Ps][mG] |
| 846 | 24246 | [5Phos][mU][Ps][fU][Ps][mG][fC][mA][fG][mA][fA][mU][fA][mA][fC][mA][fU][Ps][mG] |
| | | [Ps][fU][Ps][mC][Ps][fC][Ps][mA] |
| 847 | 24247 | [5Phos][mU][Ps][fA][Ps][mG][fA][mA][fG][mU][fC][mC][fU][mA][fU][mA][fG][Ps][mU] |
| | | [Ps][fU][Ps][mG][Ps][fU][Ps][mA] |
| 848 | 24248 | [5Phos][mU][Ps][fA][Ps][mU][fA][mA][fC][mU][fU][mU][fU][mA][fA][mU][fA][Ps][mG] |
| | | [Ps][fA][Ps][mG][Ps][fA][Ps][mU] |
| 849 | 24249 | [5Phos][mU][Ps][fC][Ps][mU][fA][mA][fG][mA][fU][mU][fU][mC][fU][mU][fU][Ps][mU] |
| | | [Ps][fC][Ps][mC][Ps][fA][Ps][mA] |
| 850 | 24250 | [5Phos][mU][Ps][fA][Ps][mU][fA][mA][fA][mU][fG][mA][fA][mC][fA][mU][fG][Ps][mG] |
| | | [Ps][fC][Ps][mC][Ps][fU][Ps][mG] |

Note =
Each of the above constructs may or may not have a phosphate modification at the 5′ end group. Furthermore, and independently, each of the above constructs may or may not have a “3x GalNAc” coupled to the 3′ end group. Optional are constructs with a 3x GalNAc ligand. Particularly optional are constructs which in addition have a 5′ phosphate, even though this is not a strict requirement, given that in the absence thereof, mammalian cells will add such phosphate in case it is absent from the molecule as administered.

TABLE 3b
Modified sense constructs of the present disclosure

| SEQ | | |
|---|---|---|
| ID | Sense | |
| NO | ID | Modified 15 mer Antisense |
| 851 | 14151 | [fC][Ps][mA][Ps][fG][mG][fC][mC][fA][mA][fA][mC] |
| | | [fU][mG][fU][Ps][mG][Ps][fA][3XGalNAc] |
| 852 | 14152 | [fU][Ps][mG][Ps][fA][mC][fU][mU][fC][mA][fA][mG] |
| | | [fA][mU][fU][Ps][mC][Ps][fA][3XGalNAc] |
| 853 | 14153 | [fC][Ps][mA][Ps][fG][mC][fU][mA][fC][mA][fA][mG] |
| | | [fC][mC][fC][Ps][mA][Ps][fA][3XGalNAc] |
| 854 | 14154 | [fA][Ps][mC][Ps][fU][mA][fU][mA][fA][mU][fU][mA] |
| | | [fC][mU][fU][Ps][mG][Ps][fA][3XGalNAc] |
| 855 | 14155 | [fC][Ps][mA][Ps][fG][mA][fC][mA][fA][mA][fC][mC] |
| | | [fU][mG][fU][Ps][mU][Ps][fA][3XGalNAc] |
| 856 | 14156 | [fU][Ps][mG][Ps][fU][mU][fA][mA][fA][mA][fU][mG] |
| | | [fU][mC][fU][Ps][mG][Ps][fA][3XGalNAc] |
| 857 | 14157 | [fC][Ps][mA][Ps][fA][mC][fC][mA][fG][mC][fU][mC] |
| | | [fC][mA][fG][Ps][mG][Ps][fA][3XGalNAc] |
| 858 | 14158 | [fU][Ps][mU][Ps][fA][mC][fU][mU][fG][mA][fU][mU] |
| | | [fU][mU][fA][Ps][mU][Ps][fA][3XGalNAc] |
| 859 | 14159 | [fA][Ps][mG][Ps][fG][mC][fC][mA][fA][mA][fC][mU] |
| | | [fG][mU][fG][Ps][mU][Ps][fA][3XGalNAc] |
| 860 | 14160 | [fG][Ps][mA][Ps][fC][mU][fU][mC][fA][mA][fG][mA] |
| | | [fU][mU][fC][Ps][mC][Ps][fA][3XGalNAc] |
| 861 | 14161 | [fU][Ps][mG][Ps][fU][mG][fU][mU][fA][mA][fA][mA] |
| | | [fU][mG][fU][Ps][mC][Ps][fA][3XGalNAc] |
| 862 | 14162 | [fC][Ps][mU][Ps][fU][mU][fU][mC][fC][mU][fG][mA] |
| | | [fC][mU][fU][Ps][mC][Ps][fA][3XGalNAc] |
| 863 | 14163 | [fC][Ps][mC][Ps][fA][mG][fG][mC][fC][mA][fA][mA] |
| | | [fC][mU][fG][Ps][mU][Ps][fA][3XGalNAc] |
| 864 | 14164 | [fU][Ps][mA][Ps][fA][mC][fU][mC][fA][mC][fU][mA] |
| | | [fU][mA][fA][Ps][mU][Ps][fA][3XGalNAc] |
| 865 | 14165 | [fG][Ps][mA][Ps][fC][mA][fU][mC][fU][mG][fA][mC] |
| | | [fU][mU][fG][Ps][mG][Ps][fA][3XGalNAc] |
| 866 | 14166 | [fU][Ps][mA][Ps][fU][mC][fU][mC][fU][mU][fU][mU] |
| | | [fC][mC][fU][Ps][mG][Ps][fA][3XGalNAc] |
| 867 | 14167 | [fA][Ps][mG][Ps][fA][mA][fU][mA][fU][mG][fU][mC] |
| | | [fU][mU][fG][Ps][mC][Ps][fA][3XGalNAc] |
| 868 | 14168 | [fU][Ps][mG][Ps][fG][mA][fA][mA][fU][mU][fG][mG] |
| | | [fC][mC][fU][Ps][mU][Ps][fA][3XGalNAc] |
| 869 | 14169 | [fC][Ps][mA][Ps][fC][mU][fA][mU][fA][mA][fU][mU] |
| | | [fA][mC][fU][Ps][mU][Ps][fA][3XGalNAc] |
| 870 | 14170 | [fA][Ps][mU][Ps][fU][mA][fC][mU][fU][mG][fA][mU] |
| | | [fU][mU][fU][Ps][mA][Ps][fA][3XGalNAc] |
| 871 | 14171 | [fC][Ps][mU][Ps][fA][mU][fA][mA][fU][mU][fA][mC] |
| | | [fU][mU][fG][Ps][mA][Ps][fA][3XGalNAc] |
| 872 | 14172 | [fC][Ps][mC][Ps][fU][mC][fU][mG][fG][mA][fA][mA] |
| | | [fU][mU][fG][Ps][mG][Ps][fA][3XGalNAc] |
| 873 | 14173 | [fC][Ps][mU][Ps][fC][mA][fC][mU][fA][mU][fA][mA] |
| | | [fU][mU][fA][Ps][mC][Ps][fA][3XGalNAc] |
| 874 | 14174 | [fC][Ps][mA][Ps][fA][mC][fA][mA][fG][mU][fA][mC] |
| | | [fC][mU][fU][Ps][mU][Ps][fA][3XGalNAc] |
| 875 | 14175 | [fU][Ps][mC][Ps][fU][mG][fA][mA][fA][mC][fA][mG] |
| | | [fC][mA][fG][Ps][mU][Ps][fA][3XGalNAc] |
| 876 | 14176 | [fU][Ps][mU][Ps][fC][mU][fG][mA][fA][mA][fC][mA] |
| | | [fG][mC][fA][Ps][mG][Ps][fA][3XGalNAc] |
| 877 | 14177 | [fC][Ps][mA][Ps][fA][mG][fU][mA][fC][mC][fU][mU] |
| | | [fU][mA][fU][Ps][mA][Ps][fA][3XGalNAc] |
| 878 | 14178 | [fA][Ps][mA][Ps][fG][mG][fA][mA][fC][mU][fG][mU] |
| | | [fU][mU][fA][Ps][mC][Ps][fA][3XGalNAc] |
| 879 | 14179 | [fU][Ps][mC][Ps][fA][mG][fC][mC][fA][mA][fA][mG][ |
| | | fU][mU][fA][Ps][mC][Ps][fA][3XGalNAc] |
| 880 | 14180 | [fC][Ps][mU][Ps][fG][mU][fU][mU][fA][mC][fA][mA] |
| | | [fC][mU][fA][Ps][mU][Ps][fA][3XGalNAc] |
| 881 | 14181 | [fA][Ps][mG][Ps][fU][mU][fA][mA][fA][mG][fA][mA] |
| | | [fU][mA][fU][Ps][mG][Ps][fA][3XGalNAc] |
| 882 | 14182 | [fG][Ps][mU][Ps][fA][mA][fA][mA][fG][mG][fA][mC] |
| | | [fU][mG][fC][Ps][mU][Ps][fA][3XGalNAc] |
| 883 | 14183 | [fC][Ps][mA][Ps][fA][mA][fA][mU][fA][mA][fC][mU] |
| | | [fC][mA][fC][Ps][mU][Ps][fA][3XGalNAc] |
| 884 | 14184 | [fC][Ps][mA][Ps][fA][mA][fG][mA][fU][mG][fU][mC] |
| | | [fU][mU][fC][Ps][mC][Ps][fA][3XGalNAc] |
| 885 | 14185 | [fG][Ps][mU][Ps][fG][mU][fA][mA][fA][mA][fG][mG] |
| | | [fA][mC][fU][Ps][mG][Ps][fA][3XGalNAc] |
| 886 | 14186 | [fA][Ps][mU][Ps][fU][mG][fA][mC][fA][mA][fA][mA] |
| | | [fU][mA][fA][Ps][mC][Ps][fA][3XGalNAc] |
| 887 | 14187 | [fC][Ps][mA][Ps][fU][mA][fU][mU][fC][mU][fG][mU] |
| | | [fU][mG][fU][Ps][mA][Ps][fA][3XGalNAc] |
| 888 | 14188 | [fU][Ps][mA][Ps][fU][mU][fG][mA][fC][mA][fA][mA] |
| | | [fA][mU][fA][Ps][mA][Ps][fA][3XGalNAc] |
| 889 | 14189 | [fU][Ps][mU][Ps][fU][mU][fC][mC][fU][mG][fA][mA] |
| | | [fG][mC][fC][Ps][mU][Ps][fA][3XGalNAc] |
| 890 | 14190 | [fA][Ps][mU][Ps][fU][mA][fU][mC][fU][mC][fU][mU] |
| | | [fU][mU][fC][Ps][mC][Ps][fA][3XGalNAc] |
| 891 | 14191 | [fU][Ps][mA][Ps][fU][mA][fU][mU][fG][mC][fU][mG] |
| | | [fU][mA][fA][Ps][mC][Ps][fA][3XGalNAc] |
| 892 | 14192 | [fU][Ps][mU][Ps][fG][mC][fA][mU][fA][mU][fG][mC] |
| | | [fU][mU][fA][Ps][mU][Ps][fA][3XGalNAc] |
| 893 | 14193 | [fA][Ps][mA][Ps][fG][mU][fU][mA][fA][mA][fG][mA] |
| | | [fA][mU][fA][Ps][mU][Ps][fA][3XGalNAc] |
| 894 | 14194 | [fG][Ps][mU][Ps][fU][mC][fA][mA][fA][mG][fA][mU] |
| | | [fG][mU][fC][Ps][mU][Ps][fA][3XGalNAc] |
| 895 | 14195 | [fA][Ps][mA][Ps][fG][mA][fU][mG][fU][mC][fU][mU] |
| | | [fC][mC][fU][Ps][mG][Ps][fA][3XGalNAc] |
| 896 | 14196 | [fC][Ps][mU][Ps][fU][mU][fA][mU][fA][mU][fU][mG] |
| | | [fC][mU][fG][Ps][mU][Ps][fA][3XGalNAc] |
| 897 | 14197 | [fU][Ps][mA][Ps][fA][mC][fC][mU][fA][mU][fG][mA] |
| | | [fC][mA][fA][Ps][mU][Ps][fA][3XGalNAc] |
| 898 | 14198 | [fU][Ps][mG][Ps][fA][mC][fA][mA][fA][mA][fU][mA] |
| | | [fA][mC][fU][Ps][mC][Ps][fA][3XGalNAc] |
| 899 | 14199 | [fA][Ps][mC][Ps][fA][mA][fA][mA][fU][mA][fA][mC] |
| | | [fU][mC][fA][Ps][mC][Ps][fA][3XGalNAc] |
| 900 | 14200 | [fG][Ps][mA][Ps][fC][mA][fA][mA][fA][mU][fA][mA] |
| | | [fC][mU][fC][Ps][mA][Ps][fA][3XGalNAc] |
| 901 | 14201 | [fU][Ps][mU][Ps][fU][mC][fA][mA][fG][mG][fA][mA] |
| | | [fA][mA][fU][Ps][mU][Ps][fA][3XGalNAc] |
| 902 | 14202 | [fU][Ps][mA][Ps][fU][mU][fG][mC][fU][mG][fU][mA] |
| | | [fA][mC][fA][Ps][mG][Ps][fA][3XGalNAc] |
| 903 | 14203 | [fU][Ps][mA][Ps][fU][mG][fA][mC][fA][mA][fU][mG] |
| | | [fG][mA][fU][Ps][mU][Ps][fA][3XGalNAc] |
| 904 | 14204 | [fC][Ps][mU][Ps][fA][mU][fG][mA][fC][mA][fA][mU] |
| | | [fG][mG][fA][Ps][mU][Ps][fA][3XGalNAc] |
| 905 | 14205 | [fG][Ps][mA][Ps][fC][mA][fA][mU][fG][mG][fA][mU] |
| | | [fU][mU][fC][Ps][mU][Ps][fA][3XGalNAc] |
| 906 | 14206 | [fU][Ps][mA][Ps][fA][mA][fG][mA][fA][mU][fA][mU] |
| | | [fG][mU][fC][Ps][mU][Ps][fA][3XGalNAc] |
| 907 | 14207 | [fA][Ps][mG][Ps][fG][mG][fA][mA][fU][mC][fU][mG] |
| | | [fC][mA][fC][Ps][mU][Ps][fA][3XGalNAc] |
| 908 | 14208 | [fC][Ps][mC][Ps][fU][mA][fU][mG][fA][mC][fA][mA] |
| | | [fU][mG][fG][Ps][mA][Ps][fA][3XGalNAc] |
| 909 | 14209 | [fA][Ps][mG][Ps][fG][mG][fA][mA][fU][mC][fU][mG] |
| | | [fC][mA][fC][Ps][mU][Ps][fA][3XGalNAc] |
| 910 | 14210 | [fA][Ps][mA][Ps][fC][mC][fU][mA][fU][mG][fA][mC] |
| | | [fA][mA][fU][Ps][mG][Ps][fA][3XGalNAc] |
| 911 | 14211 | [fA][Ps][mU][Ps][fG][mG][fA][mU][fU][mU][fC][mU] |
| | | [fC][mU][fU][Ps][mC][Ps][fA][3XGalNAc] |
| 912 | 14212 | [fG][Ps][mU][Ps][fU][mA][fA][mA][fG][mA][fA][mU] |
| | | [fA][mU][fG][Ps][mU][Ps][fA][3XGalNAc] |
| 913 | 14213 | [fA][Ps][mG][Ps][fU][mG][fU][mA][fA][mA][fA][mG] |
| | | [fG][mA][fC][Ps][mU][Ps][fA][3XGalNAc] |
| 914 | 14214 | [fC][Ps][mU][Ps][fU][mU][fC][mA][fA][mG][fG][mA] |
| | | [fA][mA][fA][Ps][mU][Ps][fA][3XGalNAc] |
| 915 | 14215 | [fU][Ps][mA][Ps][fA][mA][fA][mU][fA][mC][fA][mA] |
| | | [fU][mU][fU][Ps][mC][Ps][fA][3XGalNAc] |
| 916 | 14216 | [fA][Ps][mA][Ps][fU][mU][fU][mU][fG][mA][fA][mA] |
| | | [fU][mU][fA][Ps][mC][Ps][fA][3XGalNAc] |
| 917 | 14217 | [fA][Ps][mC][Ps][fU][mU][fU][mA][fA][mG][fA][mA] |
| | | [fU][mU][fU][Ps][mU][Ps][fA][3XGalNAc] |
| 918 | 14218 | [fC][Ps][mA][Ps][fG][mA][fA][mC][fC][mA][fA][mA] |
| | | [fA][mU][fU][Ps][mC][Ps][fA][3XGalNAc] |
| 919 | 14219 | [fA][Ps][mA][Ps][fU][mU][fA][mU][fA][mA][fA][mA] |
| | | [fU][mG][fA][Ps][mC][Ps][fA][3XGalNAc] |
| 920 | 14220 | [fC][Ps][mA][Ps][fG][mU][fA][mC][fA][mG][fG][mA] |
| | | [fU][mU][fU][Ps][mG][Ps][fA][3XGalNAc] |
| 921 | 14221 | [fU][Ps][mA][Ps][fU][mU][fA][mA][fA][mA][fG][mU] |
| | | [fU][mA][fU][Ps][mC][Ps][fA][3XGalNAc] |
| 922 | 14222 | [fA][Ps][mA][Ps][fG][mA][fG][mA][fA][mG][fA][mC] |
| | | [fU][mU][fA][Ps][mA][Ps][fA][3XGalNAc] |
| 923 | 14223 | [fC][Ps][mA][Ps][fU][mA][fU][mU][fG][mG][fA][mA] |
| | | [fU][mU][fA][Ps][mU][Ps][fA][3XGalNAc] |
| 924 | 14224 | [fC][Ps][mA][Ps][fU][mG][fU][mU][fC][mA][fU][mU] |
| | | [fU][mA][fU][Ps][mC][Ps][fA][3XGalNAc] |
| 925 | 14225 | [fA][Ps][mA][Ps][fA][mU][fG][mA][fU][mG][fA][mA] |
| | | [fC][mC][fU][Ps][mU][Ps][fA][3XGalNAc] |
| 926 | 14226 | [fU][Ps][mU][Ps][fU][mA][fU][mA][fG][mC][fA][mC] |
| | | [fU][mU][fC][Ps][mC][Ps][fA][3XGalNAc] |
| 927 | 14227 | [fU][Ps][mU][Ps][fU][mA][fA][mG][fA][mG][fU][mA] |
| | | [fC][mU][fU][Ps][mG][Ps][fA][3XGalNAc] |
| 928 | 14228 | [fC][Ps][mA][Ps][fG][mG][fA][mA][fA][mU][fC][mA] |
| | | [fU][mU][fG][Ps][mG][Ps][fA][3XGalNAc] |
| 929 | 14229 | [fA][Ps][mA][Ps][fU][mG][fA][mA][fU][mA][fU][mA] |
| | | [fC][mC][fA][Ps][mU][Ps][fA][3XGalNAc] |
| 930 | 14230 | [fA][Ps][mA][Ps][fG][mU][fU][mC][fA][mU][fC][mU] |
| | | [fU][mG][fU][Ps][mU][Ps][fA][3XGalNAc] |
| 931 | 14231 | [fA][Ps][mA][Ps][fU][mU][fC][mC][fU][mG][fA][mA] |
| | | [fG][mU][fU][Ps][mC][Ps][fA][3XGalNAc] |
| 932 | 14232 | [fA][Ps][mA][Ps][fU][mA][fA][mG][fA][mG][fA][mA] |
| | | [fG][mA][fC][Ps][mU][Ps][fA][3XGalNAc] |
| 933 | 14233 | [fA][Ps][mA][Ps][fA][mG][fU][mA][fU][mA][fA][mA] |
| | | [fC][mA][fU][Ps][mU][Ps][fA][3XGalNAc] |
| 934 | 14234 | [fU][Ps][mG][Ps][fU][mG][fU][mA][fC][mG][fA][mU] |
| | | [fU][mC][fC][Ps][mG][Ps][fA][3XGalNAc] |
| 935 | 14235 | [fA][Ps][mA][Ps][fG][mA][fG][mC][fA][mG][fA][mG] |
| | | [fG][mU][fA][Ps][mU][Ps][fA][3XGalNAc] |
| 936 | 14236 | [fU][Ps][mA][Ps][fG][mA][fA][mG][fA][mA][fA][mU] |
| | | [fU][mG][fA][Ps][mU][Ps][fA][3XGalNAc] |
| 937 | 14237 | [fC][Ps][mA][Ps][fA][mA][fA][mC][fA][mC][fA][mA] |
| | | [fU][mG][fU][Ps][mU][Ps][fA][3XGalNAc] |
| 938 | 14238 | [fA][Ps][mU][Ps][fG][mC][fU][mU][fA][mU][fA][mA] |
| | | [fA][mG][fU][Ps][mU][Ps][fA][3XGalNAc] |
| 939 | 14239 | [fU][Ps][mU][Ps][fA][mA][fA][mA][fG][mU][fU][mA] |
| | | [fU][mC][fC][Ps][mU][Ps][fA][3XGalNAc] |
| 940 | 14240 | [fU][Ps][mA][Ps][fU][mC][fA][mA][fC][mC][fA][mA] |
| | | [fU][mA][fA][Ps][mA][Ps][fA][3XGalNAc] |
| 941 | 14241 | [fA][Ps][mA][Ps][fG][mA][fA][mA][fA][mC][fA][mG] |
| | | [fU][mU][fG][Ps][mC][Ps][fA][3XGalNAc] |
| 942 | 14242 | [fA][Ps][mG][Ps][fU][mU][fG][mU][fA][mU][fC][mA] |
| | | [fA][mA][fG][Ps][mC][Ps][fA][3XGalNAc] |
| 943 | 14243 | [fA][Ps][mG][Ps][fA][mG][fA][mG][fA][mA][fG][mC] |
| | | [fU][mU][fU][Ps][mG][Ps][fA][3XGalNAc] |
| 944 | 14244 | [fA][Ps][mC][Ps][fG][mA][fA][mA][fG][mG][fA][mG] |
| | | [fU][mU][fC][Ps][mC][Ps][fA][3XGalNAc] |
| 945 | 14245 | [fC][Ps][mA][Ps][fA][mA][fG][mA][fA][mC][fU][mG] |
| | | [fU][mC][fA][Ps][mU][Ps][fA][3XGalNAc] |
| 946 | 14246 | [fC][Ps][mA][Ps][fU][mG][fU][mU][fA][mU][fU][mC] |
| | | [fU][mG][fC][Ps][mA][Ps][fA][3XGalNAc] |
| 947 | 14247 | [fA][Ps][mC][Ps][fU][mA][fU][mA][fG][mG][fA][mC] |
| | | [fU][mU][fC][Ps][mU][Ps][fA][3XGalNAc] |
| 948 | 14248 | [fC][Ps][mU][Ps][fA][mU][fU][mA][fA][mA][fA][mG] |
| | | [fU][mU][fA][Ps][mU][Ps][fA][3XGalNAc] |
| 949 | 14249 | [fA][Ps][mA][Ps][fA][mA][fG][mA][fA][mA][fU][mC] |
| | | [fU][mU][fA][Ps][mG][Ps][fA][3XGalNAc] |
| 950 | 14250 | [fC][Ps][mC][Ps][fA][mU][fG][mU][fU][mC][fA][mU] |
| | | [fU][mU][fA][Ps][mU][Ps][fA][3XGalNAc] |

Note =
each of the above constructs may or may not have a “3x GalNAc” coupled to the 3′ end group. Optional are constructs with a 3x GalNAc ligand, in particular a toothbrush ligand as defined herein.

TABLE 3c
Modified hairpin constructs of the present disclosure

| | Anti- | | |
|---|---|---|---|
| | sense | Experi- | |
| SEQ | ID + | mental | |
| ID | Sense | denota- | |
| NO | ID | tion | Modified 33 mer Hairpin |
| 951 | 14151_ | C5-m-01 | [5Phos][mU][Ps][fC][Ps][mA][fC][mA][fG][mU][fU][mU][fG][mG][fC][m |
| | 24151 | | C][fU][Ps][mG][Ps][fG][Ps][mA][Ps][fG][Ps][mA][Ps][mA] |
| | | | [fG][mG][fC][mC][fA][mA][fA][mC][fU][mG][fU][Ps][mG][Ps][fA][3xGal |
| | | | Nac] |
| 952 | 14152_ | C5-m-02 | [5Phos][mU][Ps][fG][Ps][mA][fA][mU][fC][mU][fU][mG][fA][mA][fG][m |
| | 24152 | | U][fC][Ps][mA][Ps][fG][Ps][mG][Ps][fA][Ps][mA][Ps][mG] |
| | | | [fA][mC][fU][mU][fC][mA][fA][mG][fA][mU][fU][Ps][mC][Ps][fA][3xGal |
| | | | Nac] |
| 953 | 14153_ | C5-m-03 | [5Phos][mU][Ps][fU][Ps][mG][fG][mG][fC][mU][fU][mG][fU][mA][fG][ |
| | 24153 | | mC][fU][Ps][mG][Ps][fG][Ps][mC][Ps][fA][Ps][mC][Ps][mA] |
| | | | [fG][mC][fU][mA][fC][mA][fA][mG][fC][mC][fC][Ps][mA][Ps][fA][3xGal |
| | | | Nac] |
| 954 | 14154_ | C5-m-04 | [5Phos][mU][Ps][fC][Ps][mA][fA][mG][fU][mA][fA][mU][fU][mA][fU][m |
| | 24154 | | A][fG][Ps][mU][Ps][fG][Ps][mA][Ps][fG][Ps][mU][Ps][mC] |
| | | | [fU][mA][fU][mA][fA][mU][fU][mA][fC][mU][fU][Ps][mG][Ps][fA][3xGal |
| | | | Nac] |
| 955 | 14155_ | C5-m-05 | [5Phos][mU][Ps][fA][Ps][mA][fC][mA][fG][mG][fU][mU][fU][mG][fU][m |
| | 24155 | | C][fU][Ps][mG][Ps][fU][Ps][mA][Ps][fU][Ps][mG][Ps][mA] |
| | | | [fG][mA][fC][mA][fA][mA][fC][mC][fU][mG][fU][Ps][mU][Ps][fA][3xGal |
| | | | Nac] |
| 956 | 14156_ | C5-m-06 | [5Phos][mU][Ps][fC][Ps][mA][fG][mA][fC][mA][fU][mU][fU][mU][fA][m |
| | 24156 | | A][fC][Ps][mA][Ps][fC][Ps][mA][Ps][fG][Ps][mA][Ps][mG] |
| | | | [fU][mU][fA][mA][fA][mA][fU][mG][fU][mC][fU][Ps][mG][Ps][fA][3xGal |
| | | | Nac] |
| 957 | 14157_ | C5-m-07 | [5Phos][mU][Ps][fC][Ps][mC][fU][mG][fG][mA][fG][mC][fU][mG][fG][ |
| | 24157 | | mU][fU][Ps][mG][Ps][fC][Ps][mC][Ps][fA][Ps][mC][Ps][mA] |
| | | | [fA][mC][fC][mA][fG][mC][fU][mC][fC][mA][fG][Ps][mG][Ps][fA][3xGal |
| | | | Nac] |
| 958 | 14158_ | C5-m-08 | [5Phos][mU][Ps][fA][Ps][mU][fA][mA][fA][mA][fU][mC][fA][mA][fG][m |
| | 24158 | | U][fA][Ps][mA][Ps][fU][Ps][mU][Ps][fA][Ps][mU][Ps][mU] |
| | | | [fA][mC][fU][mU][fG][mA][fU][mU][fU][mU][fA][Ps][mU][Ps][fA][3xGal |
| | | | Nac] |
| 959 | 14159_ | C5-m-09 | [5Phos][mU][Ps][fA][Ps][mC][fA][mC][fA][mG][fU][mU][fU][mG][fG][m |
| | 24159 | | C][fC][Ps][mU][Ps][fG][Ps][mG][Ps][fA][Ps][mG][Ps][mG] |
| | | | [fG][mC][fC][mA][fA][mA][fC][mU][fG][mU][fG][Ps][mU][Ps][fA][3xGal |
| | | | Nac] |
| 960 | 14160_ | C5-m-10 | [5Phos][mU][Ps][fG][Ps][mG][fA][mA][fU][mC][fU][mU][fG][mA][fA][m |
| | 24160 | | G][fU][Ps][mC][Ps][fA][Ps][mG][Ps][fG][Ps][mA][Ps][mA] |
| | | | [fC][mU][fU][mC][fA][mA][fG][mA][fU][mU][fC][Ps][mC][Ps][fA][3xGal |
| | | | Nac] |
| 961 | 14161_ | C5-m-11 | [5Phos][mU][Ps][fG][Ps][mA][fC][mA][fU][mU][fU][mU][fA][mA][fC][m |
| | 24161 | | A][fC][Ps][mA][Ps][fG][Ps][mA][Ps][fA][Ps][mC][Ps][mG] |
| | | | [fU][mG][fU][mU][fA][mA][fA][mA][fU][mG][fU][Ps][mC][Ps][fA][3xGal |
| | | | Nac] |
| 962 | 14162_ | C5-m-12 | [5Phos][mU][Ps][fG][Ps][mA][fA][mG][fU][mC][fA][mG][fG][mA][fA][m |
| | 24162 | | A][fA][Ps][mG][Ps][fA][Ps][mG][Ps][fA][Ps][mU][Ps][mU] |
| | | | [fU][mU][fU][mC][fC][mU][fG][mA][fC][mU][fU][Ps][mC][Ps][fA][3xGal |
| | | | Nac] |
| 963 | 14163_ | C5-m-13 | [5Phos][mU][Ps][fA][Ps][mC][fA][mG][fU][mU][fU][mG][fG][mC][fC][m |
| | 24163 | | U][fG][Ps][mG][Ps][fA][Ps][mG][Ps][fA][Ps][mA][Ps][mC] |
| | | | [fA][mG][fG][mC][fC][mA][fA][mA][fC][mU][fG][Ps][mU][Ps][fA][3xGal |
| | | | Nac] |
| 964 | 14164_ | C5-m-14 | [5Phos][mU][Ps][fA][Ps][mU][fU][mA][fU][mA][fG][mU][fG][mA][fG][m |
| | 24164 | | U][fU][Ps][mA][Ps][fU][Ps][mU][Ps][fU][Ps][mU][Ps][mA] |
| | | | [fA][mC][fU][mC][fA][mC][fU][mA][fU][mA][fA][Ps][mU][Ps][fA][3xGal |
| | | | Nac] |
| 965 | 14165_ | C5-m-15 | [5Phos][mU][Ps][fC][Ps][mC][fA][mA][fG][mU][fC][mA][fG][mA][fU][m |
| | 24165 | | G][fU][Ps][mC][Ps][fU][Ps][mC][Ps][fU][Ps][mU][Ps][mA] |
| | | | [fC][mA][fU][mC][fU][mG][fA][mC][fU][mU][fG][Ps][mG][Ps][fA][3xGal |
| | | | Nac] |
| 966 | 14166_ | C5-m-16 | [5Phos][mU][Ps][fC][Ps][mA][fG][mG][fA][mA][fA][mA][fG][mA][fG][m |
| | 24166 | | A][fU][Ps][mA][Ps][fA][Ps][mU][Ps][fU][Ps][mC][Ps][mA] |
| | | | [fU][mC][fU][mC][fU][mU][fU][mU][fC][mC][fU][Ps][mG][Ps][fA][3xGal |
| | | | Nac] |
| 967 | 14167_ | C5-m-17 | [5Phos][mU][Ps][fG][Ps][mC][fA][mA][fG][mA][fC][mA][fU][mA][fU][m |
| | 24167 | | U][fC][Ps][mU][Ps][fU][Ps][mU][Ps][fA][Ps][mA][Ps][mG] |
| | | | [fA][mA][fU][mA][fU][mG][fU][mC][fU][mU][fG][Ps][mC][Ps][fA][3xGal |
| | | | Nac] |
| 968 | 14168_ | C5-m-18 | [5Phos][mU][Ps][fA][Ps][mA][fG][mG][fC][mC][fA][mA][fU][mU][fU][m |
| | 24168 | | C][fC][Ps][mA][Ps][fG][Ps][mA][Ps][fG][Ps][mG][Ps][mG] |
| | | | [fG][mA][fA][mA][fU][mU][fG][mG][fC][mC][fU][Ps][mU][Ps][fA][3xGal |
| | | | Nac] |
| 969 | 14169_ | C5-m-19 | [5Phos][mU][Ps][fA][Ps][mA][fG][mU][fA][mA][fU][mU][fA][mU][fA][m |
| | 24169 | | G][fU][Ps][mG][Ps][fA][Ps][mG][Ps][fU][Ps][mU][Ps][mA] |
| | | | [fC][mU][fA][mU][fA][mA][fU][mU][fA][mC][fU][Ps][mU][Ps][fA][3xGal |
| | | | Nac] |
| 970 | 14170_ | C5-m-20 | [5Phos][mU][Ps][fU][Ps][mA][fA][mA][fA][mU][fC][mA][fA][mG][fU][m |
| | 24170 | | A][fA][Ps][mU][Ps][fU][Ps][mA][Ps][fU][Ps][mA][Ps][mU] |
| | | | [fU][mA][fC][mU][fU][mG][fA][mU][fU][mU][fU][Ps][mA][Ps][fA][3xGal |
| | | | Nac] |
| 971 | 14171_ | C5-m-21 | [5Phos][mU][Ps][fU][Ps][mC][fA][mA][fG][mU][fA][mA][fU][mU][fA][m |
| | 24171 | | U][fA][Ps][mG][Ps][fU][Ps][mG][Ps][fA][Ps][mG][Ps][mU] |
| | | | [fA][mU][fA][mA][fU][mU][fA][mC][fU][mU][fG][Ps][mA][Ps][fA][3xGal |
| | | | Nac] |
| 972 | 14172_ | C5-m-22 | [5Phos][mU][Ps][fC][Ps][mC][fA][mA][fU][mU][fU][mC][fC][mA][fG][m |
| | 24172 | | A][fG][Ps][mG][Ps][fA][Ps][mA][Ps][fG][Ps][mC][Ps][mC] |
| | | | [fU][mC][fU][mG][fG][mA][fA][mA][fU][mU][fG][Ps][mG][Ps][fA][3xGal |
| | | | Nac] |
| 973 | 14173_ | C5-m-23 | [5Phos][mU][Ps][fG][Ps][mU][fA][mA][fU][mU][fA][mU][fA][mG][fU][m |
| | 24173 | | G][fA][Ps][mG][Ps][fU][Ps][mU][Ps][fA][Ps][mU][Ps][mU] |
| | | | [fC][mA][fC][mU][fA][mU][fA][mA][fU][mU][fA][Ps][mC][Ps][fA][3xGal |
| | | | Nac] |
| 974 | 14174_ | C5-m-24 | [5Phos][mU][Ps][fA][Ps][mA][fA][mG][fG][mU][fA][mC][fU][mU][fG][m |
| | 24174 | | U][fU][Ps][mG][Ps][fU][Ps][mU][Ps][fU][Ps][mA][Ps][mA] |
| | | | [fA][mC][fA][mA][fG][mU][fA][mC][fC][mU][fU][Ps][mU][Ps][fA][3xGal |
| | | | Nac] |
| 975 | 14175_ | C5-m-25 | [5Phos][mU][Ps][fA][Ps][mC][fU][mG][fC][mU][fG][mU][fU][mU][fC][m |
| | 24175 | | A][fG][Ps][mA][Ps][fA][Ps][mU][Ps][fC][Ps][mA][Ps][mC] |
| | | | [fU][mG][fA][mA][fA][mC][fA][mG][fC][mA][fG][Ps][mU][Ps][fA][3xGal |
| | | | Nac] |
| 976 | 14176_ | C5-m-26 | [5Phos][mU][Ps][fC][Ps][mU][fG][mC][fU][mG][fU][mU][fU][mC][fA][m |
| | 24176 | | G][fA][Ps][mA][Ps][fU][Ps][mC][Ps][fA][Ps][mA][Ps][mU] |
| | | | [fC][mU][fG][mA][fA][mA][fC][mA][fG][mC][fA][Ps][mG][Ps][fA][3xGal |
| | | | Nac] |
| 977 | 14177_ | C5-m-27 | [5Phos][mU][Ps][fU][Ps][mA][fU][mA][fA][mA][fG][mG][fU][mA][fC][m |
| | 24177 | | U][fU][Ps][mG][Ps][fU][Ps][mU][Ps][fG][Ps][mU][Ps][mA] |
| | | | [fA][mG][fU][mA][fC][mC][fU][mU][fU][mA][fU][Ps][mA][Ps][fA][3xGal |
| | | | Nac] |
| 978 | 14178_ | C5-m-28 | [5Phos][mU][Ps][fG][Ps][mU][fA][mA][fA][mC][fA][mG][fU][mU][fC][m |
| | 24178 | | C][fU][Ps][mU][Ps][fU][Ps][mC][Ps][fA][Ps][mA][Ps][mA] |
| | | | [fG][mG][fA][mA][fC][mU][fG][mU][fU][mU][fA][Ps][mC][Ps][fA][3xGal |
| | | | Nac] |
| 979 | 14179_ | C5-m-29 | [5Phos][mU][Ps][fG][Ps][mU][fA][mA][fC][mU][fU][mU][fG][mG][fC][m |
| | 24179 | | U][fG][Ps][mA][Ps][fG][Ps][mA][Ps][fG][Ps][mA][Ps][mC] |
| | | | [fA][mG][fC][mC][fA][mA][fA][mG][fU][mU][fA][Ps][mC][Ps][fA][3xGal |
| | | | Nac] |
| 980 | 14180_ | C5-m-30 | [5Phos][mU][Ps][fA][Ps][mU][fA][mG][fU][mU][fG][mU][fA][mA][fA][m |
| | 24180 | | C][fA][Ps][mG][Ps][fU][Ps][mU][Ps][fC][Ps][mC][Ps][mU] |
| | | | [fG][mU][fU][mU][fA][mC][fA][mA][fC][mU][fA][Ps][mU][Ps][fA][3xGal |
| | | | Nac] |
| 981 | 14181_ | C5-m-31 | [5Phos][mU][Ps][fC][Ps][mA][fU][mA][fU][mU][fC][mU][fU][mU][fA][m |
| | 24181 | | A][fC][Ps][mU][Ps][fU][Ps][mC][Ps][fA][Ps][mA][Ps][mG][fU][mU] |
| | | | [fA][mA][fA][mG][fA][mA][fU][mA][fU][Ps][mG][Ps][fA][3xGal |
| | | | Nac] |
| 982 | 14182_ | C5-m-32 | [5Phos][mU][Ps][fA][Ps][mG][fC][mA][fG][mU][fC][mC][fU][mU][fU][m |
| | 24182 | | U][fA][Ps][mC][Ps][fA][Ps][mC][Ps][fU][Ps][mC][Ps][mU] |
| | | | [fA][mA][fA][mA][fG][mG][fA][mC][fU][mG][fC][Ps][mU][Ps][fA][3xGal |
| | | | Nac] |
| 983 | 14183_ | C5-m-33 | [5Phos][mU][Ps][fA][Ps][mG][fU][mG][fA][mG][fU][mU][fA][mU][fU][m |
| | 24183 | | U][fU][Ps][mG][Ps][fU][Ps][mC][Ps][fA][Ps][mA][Ps][mA] |
| | | | [fA][mA][fA][mU][fA][mA][fC][mU][fC][mA][fC][Ps][mU][Ps][fA][3xGal |
| | | | Nac] |
| 984 | 14184_ | C5-m-34 | [5Phos][mU][Ps][fG][Ps][mG][fA][mA][fG][mA][fC][mA][fU][mC][fU][m |
| | 24184 | | U][fU][Ps][mG][Ps][fA][Ps][mA][Ps][fC][Ps][mA][Ps][mA] |
| | | | [fA][mA][fG][mA][fU][mG][fU][mC][fU][mU][fC][Ps][mC][Ps][fA][3xGal |
| | | | Nac] |
| 985 | 14185_ | C5-m-35 | [5Phos][mU][Ps][fC][Ps][mA][fG][mU][fC][mC][fU][mU][fU][mU][fA][m |
| | 24185 | | C][fA][Ps][mC][Ps][fU][Ps][mC][Ps][fA][Ps][mA][Ps][mU] |
| | | | [fG][mU][fA][mA][fA][mA][fG][mG][fA][mC][fU][Ps][mG][Ps][fA][3xGal |
| | | | Nac] |
| 986 | 14186_ | C5-m-36 | [5Phos][mU][Ps][fG][Ps][mU][fU][mA][fU][mU][fU][mU][fG][mU][fC][m |
| | 24186 | | A][fA][Ps][mU][Ps][fA][Ps][mU][Ps][fA][Ps][mU][Ps][mU] |
| | | | [fU][mG][fA][mC][fA][mA][fA][mA][fU][mA][fA][Ps][mC][Ps][fA][3xGal |
| | | | Nac] |
| 987 | 14187_ | C5-m-37 | [5Phos][mU][Ps][fU][Ps][mA][fC][mA][fA][mC][fA][mG][fA][mA][fU][m |
| | 24187 | | A][fU][Ps][mG][Ps][fG][Ps][mU][Ps][fA][Ps][mU][Ps][mA] |
| | | | [fU][mA][fU][mU][fC][mU][fG][mU][fU][mG][fU][Ps][mA][Ps][fA][3xGal |
| | | | Nac] |
| 988 | 14188_ | C5-m-38 | [5Phos][mU][Ps][fU][Ps][mU][fA][mU][fU][mU][fU][mG][fU][mC][fA][m |
| | 24188 | | A][fU][Ps][mA][Ps][fU][Ps][mA][Ps][fU][Ps][mG][Ps][mA] |
| | | | [fU][mU][fG][mA][fC][mA][fA][mA][fA][mU][fA][Ps][mA][Ps][fA][3xGal |
| | | | Nac] |
| 989 | 14189_ | C5-m-39 | [5Phos][mU][Ps][fA][Ps][mG][fG][mC][fU][mU][fC][mA][fG][mG][fA][m |
| | 24189 | | A][fA][Ps][mA][Ps][fG][Ps][mA][Ps][fG][Ps][mG][Ps][mU] |
| | | | [fU][mU][fC][mC][fU][mG][fA][mA][fG][mC][fC][Ps][mU][Ps][fA][3xGal |
| | | | Nac] |
| 990 | 14190_ | C5-m-40 | [5Phos][mU][Ps][fG][Ps][mG][fA][mA][fA][mA][fG][mA][fG][mA][fU][m |
| | 24190 | | A][fA][Ps][mU][Ps][fU][Ps][mC][Ps][fC][Ps][mA][Ps][mU] |
| | | | [fU][mA][fU][mC][fU][mC][fU][mU][fU][mU][fC][Ps][mC][Ps][fA][3xGal |
| | | | Nac] |
| 991 | 14191_ | C5-m-41 | [5Phos][mU][Ps][fG][Ps][mU][fU][mA][fC][mA][fG][mC][fA][mA][fU][m |
| | 24191 | | A][fU][Ps][mA][Ps][fA][Ps][mA][Ps][fG][Ps][mG][Ps][mA] |
| | | | [fU][mA][fU][mU][fG][mC][fU][mG][fU][mA][fA][Ps][mC][Ps][fA][3xGal |
| | | | Nac] |
| 992 | 14192_ | C5-m-42 | [5Phos][mU][Ps][fA][Ps][mU][fA][mA][fG][mC][fA][mU][fA][mU][fG][m |
| | 24192 | | C][fA][Ps][mA][Ps][fU][Ps][mC][Ps][fU][Ps][mC][Ps][mU] |
| | | | [fG][mC][fA][mU][fA][mU][fG][mC][fU][mU][fA][Ps][mU][Ps][fA][3xGal |
| | | | Nac] |
| 993 | 14193_ | C5-m-43 | [5Phos][mU][Ps][fA][Ps][mU][fA][mU][fU][mC][fU][mU][fU][mA][fA][m |
| | 24193 | | C][fU][Ps][mU][Ps][fC][Ps][mA][Ps][fA][Ps][mA][Ps][mA] |
| | | | [fG][mU][fU][mA][fA][mA][fG][mA][fA][mU][fA][Ps][mU][Ps][fA][3xGal |
| | | | Nac] |
| 994 | 14194_ | C5-m-44 | [5Phos][mU][Ps][fA][Ps][mG][fA][mC][fA][mU][fC][mU][fU][mU][fG][m |
| | 24194 | | A][fA][Ps][mC][Ps][fA][Ps][mC][Ps][fC][Ps][mU][Ps][mU] |
| | | | [fU][mC][fA][mA][fA][mG][fA][mU][fG][mU][fC][Ps][mU][Ps][fA][3xGal |
| | | | Nac] |
| 995 | 14195_ | C5-m-45 | [5Phos][mU][Ps][fC][Ps][mA][fG][mG][fA][mA][fG][mA][fC][mA][fU][m |
| | 24195 | | C][fU][Ps][mU][Ps][fU][Ps][mG][Ps][fA][Ps][mA][Ps][mA] |
| | | | [fG][mA][fU][mG][fU][mC][fU][mU][fC][mC][fU][Ps][mG][Ps][fA][3xGal |
| | | | Nac] |
| 996 | 14196_ | C5-m-46 | [5Phos][mU][Ps][fA][Ps][mC][fA][mG][fC][mA][fA][mU][fA][mU][fA][m |
| | 24196 | | A][fA][Ps][mG][Ps][fG][Ps][mU][Ps][fA][Ps][mC][Ps][mU] |
| | | | [fU][mU][fA][mU][fA][mU][fU][mG][fC][mU][fG][Ps][mU][Ps][fA][3xGal |
| | | | Nac] |
| 997 | 14197_ | C5-m-47 | [5Phos][mU][Ps][fA][Ps][mU][fU][mG][fU][mC][fA][mU][fA][mG][fG][m |
| | 24197 | | U][fU][Ps][mA][Ps][fU][Ps][mU][Ps][fG][Ps][mG][Ps][mA][fA][mC][fC |
| | | | ][mU][fA][mU][fG][mA][fC][mA][fA][Ps][mU][Ps][fA][3xGalNac] |
| 998 | 14198_ | C5-m-48 | [5Phos][mU][Ps][fG][Ps][mA][fG][mU][fU][mA][fU][mU][fU][mU][fG][m |
| | 24198 | | U][fC][Ps][mA][Ps][fA][Ps][mU][Ps][fA][Ps][mU][Ps][mG][fA][mC][fA |
| | | | ][mA][fA][mA][fU][mA][fA][mC][fU][Ps][mC][Ps][fA][3xGalNac] |
| 999 | 14199_ | C5-m-49 | [5Phos][mU][Ps][fG][Ps][mU][fG][mA][fG][mU][fU][mA][fU][mU][fU][m |
| | 24199 | | U][fG][Ps][mU][Ps][fC][Ps][mA][Ps][fA][Ps][mU][Ps][mC][fA][mA][fA |
| | | | ][mA][fU][mA][fA][mC][fU][mC][fA][Ps][mC][Ps][fA][3xGalNac] |
| 1000 | 14200_ | C5-m-50 | [5Phos][mU][Ps][fU][Ps][mG][fA][mG][fU][mU][fA][mU][fU][mU][fU][m |
| | 24200 | | G][fU][Ps][mC][Ps][fA][Ps][mA][Ps][fU][Ps][mA][Ps][mA][fC][mA][fA |
| | | | ][mA][fA][mU][fA][mA][fC][mU][fC][Ps][mA][Ps][fA][3xGalNac] |
| 1001 | 14201_ | C5-m-51 | [5Phos][mU][Ps][fA][Ps][mA][fU][mU][fU][mU][fC][mC][fU][mU][fG][m |
| | 24201 | | A][fA][Ps][mA][Ps][fG][Ps][mA][Ps][fU][Ps][mC][Ps][mU][fU][mC][fA |
| | | | ][mA][fG][mG][fA][mA][fA][mA][fU][Ps][mU][Ps][fA][3xGalNac] |
| 1002 | 14202_ | C5-m-52 | [5Phos][mU][Ps][fC][Ps][mU][fG][mU][fU][mA][fC][mA][fG][mC][fA][m |
| | 24202 | | A][fU][Ps][mA][Ps][fU][Ps][mA][Ps][fA][Ps][mA][Ps][mA][fU][mU][fG |
| | | | ][mC][fU][mG][fU][mA][fA][mC][fA][Ps][mG][Ps][fA][3xGalNac] |
| 1003 | 14203_ | C5-m-53 | [5Phos][mU][Ps][fA][Ps][mA][fU][mC][fC][mA][fU][mU][fG][mU][fC][m |
| | 24203 | | A][fU][Ps][mA][Ps][fG][Ps][mG][Ps][fU][Ps][mU][Ps][mA][fU][mG][fA |
| | | | ][mC][fA][mA][fU][mG][fG][mA][fU][Ps][mU][Ps][fA][3xGalNac] |
| 1004 | 14204_ | C5-m-54 | [5Phos][mU][Ps][fA][Ps][mU][fC][mC][fA][mU][fU][mG][fU][mC][fA][m |
| | 24204 | | U][fA][Ps][mG][Ps][fG][Ps][mU][Ps][fU][Ps][mA][Ps][mU][fA][mU][fG |
| | | | ][mA][fC][mA][fA][mU][fG][mG][fA][Ps][mU][Ps][fA][3xGalNac] |
| 1005 | 14205_ | C5-m-55 | [5Phos][mU][Ps][fA][Ps][mG][fA][mA][fA][mU][fC][mC][fA][mU][fU][m |
| | 24205 | | G][fU][Ps][mC][Ps][fA][Ps][mU][Ps][fA][Ps][mG][Ps][mA][fC][mA][fA |
| | | | ][mU][fG][mG][fA][mU][fU][mU][fC][Ps][mU][Ps][fA][3xGalNac] |
| 1006 | 14206_ | C5-m-56 | [5Phos][mU][Ps][fA][Ps][mG][fA][mC][fA][mU][fA][mU][fU][mC][fU][m |
| | 24206 | | U][fU][Ps][mA][Ps][fA][Ps][mC][Ps][fU][Ps][mU][Ps][mA][fA][mA][fG |
| | | | ][mA][fA][mU][fA][mU][fG][mU][fC][Ps][mU][Ps][fA][3xGalNac] |
| 1007 | 14207_ | C5-m-57 | [5Phos][mU][Ps][fA][Ps][mG][fU][mG][fC][mA][fG][mA][fU][mU][fC][m |
| | 24207 | | C][fC][Ps][mU][Ps][fC][Ps][mC][Ps][fA][Ps][mC][Ps][mG][fG][mG][fA |
| | | | ][mA][fU][mC][fU][mG][fC][mA][fC][Ps][mU][Ps][fA][3xGalNac] |
| 1008 | 14208_ | C5-m-58 | [5Phos][mU][Ps][fU][Ps][mC][fC][mA][fU][mU][fG][mU][fC][mA][fU][m |
| | 24208 | | A][fG][Ps][mG][Ps][fU][Ps][mU][Ps][fA][Ps][mU][Ps][mC][fU][mA][fU |
| | | | ][mG][fA][mC][fA][mA][fU][mG][fG][Ps][mA][Ps][fA][3xGalNac] |
| 1009 | 14209_ | C5-m-59 | [5Phos][mU][Ps][fG][Ps][mA][fC][mA][fU][mC][fU][mU][fU][mG][fA][m |
| | 24209 | | A][fC][Ps][mA][Ps][fC][Ps][mC][Ps][fU][Ps][mU][Ps][mG][fU][mU][fC |
| | | | ][mA][fA][mA][fG][mA][fU][mG][fU][Ps][mC][Ps][fA][3xGalNac] |
| 1010 | 14210_ | C5-m-60 | [5Phos][mU][Ps][fC][Ps][mA][fU][mU][fG][mU][fC][mA][fU][mA][fG][m |
| | 24210 | | G][fU][Ps][mU][Ps][fA][Ps][mU][Ps][fU][Ps][mG][Ps][mA][fC][mC][fU |
| | | | ][mA][fU][mG][fA][mC][fA][mA][fU][Ps][mG][Ps][fA][3xGalNac] |
| 1011 | 14211_ | C5-m-61 | [5Phos][mU][Ps][fG][Ps][mA][fA][mG][fA][mG][fA][mA][fA][mU][fC][m |
| | 24211 | | C][fA][Ps][mU][Ps][fU][Ps][mG][Ps][fU][Ps][mC][Ps][mU][fG][mG][fA |
| | | | ][mU][fU][mU][fC][mU][fC][mU][fU][Ps][mC][Ps][fA][3xGalNac] |
| 1012 | 14212_ | C5-m-62 | [5Phos][mU][Ps][fA][Ps][mC][fA][mU][fA][mU][fU][mC][fU][mU][fU][m |
| | 24212 | | A][fA][Ps][mC][Ps][fU][Ps][mU][Ps][fC][Ps][mA][Ps][mU][fU][mA][fA |
| | | | ][mA][fG][mA][fA][mU][fA][mU][fG][Ps][mU][Ps][fA][3xGalNac] |
| 1013 | 14213_ | C5-m-63 | [5Phos][mU][Ps][fA][Ps][mG][fU][mC][fC][mU][fU][mU][fU][mA][fC][m |
| | 24213 | | A][fC][Ps][mU][Ps][fC][Ps][mA][Ps][fA][Ps][mA][Ps][mG][fU][mG][fU |
| | | | ][mA][fA][mA][fA][mG][fG][mA][fC][Ps][mU][Ps][fA][3xGalNac] |
| 1014 | 14214_ | C5-m-64 | [5Phos][mU][Ps][fA][Ps][mU][fU][mU][fU][mC][fC][mU][fU][mG][fA][m |
| | 24214 | | A][fA][Ps][mG][Ps][fA][Ps][mU][Ps][fC][Ps][mC][Ps][mU][fU][mU][fC |
| | | | ][mA][fA][mG][fG][mA][fA][mA][fA][Ps][mU][Ps][fA][3xGalNac] |
| 1015 | 14215_ | C5-m-65 | [5Phos][mU][Ps][fG][Ps][mA][fA][mA][fU][mU][fG][mU][fA][mU][fU][m |
| | 24215 | | U][fU][Ps][mA][Ps][fU][Ps][mC][Ps][fU][Ps][mG][Ps][mA][fA][mA][fA |
| | | | ][mU][fA][mC][fA][mA][fU][mU][fU][Ps][mC][Ps][fA][3xGalNac] |
| 1016 | 14216_ | C5-m-66 | [5Phos][mU][Ps][fG][Ps][mU][fA][mA][fU][mU][fU][mC][fA][mA][fA][m |
| | 24216 | | A][fU][Ps][mU][Ps][fC][Ps][mU][Ps][fU][Ps][mA][Ps][mA][fU][mU][fU |
| | | | ][mU][fG][mA][fA][mA][fU][mU][fA][Ps][mC][Ps][fA][3xGalNac] |
| 1017 | 14217_ | C5-m-67 | [5Phos][mU][Ps][fA][Ps][mA][fA][mA][fU][mU][fC][mU][fU][mA][fA][m |
| | 24217 | | A][fG][Ps][mU][Ps][fU][Ps][mC][Ps][fU][Ps][mU][Ps][mC][fU][mU][fU |
| | | | ][mA][fA][mG][fA][mA][fU][mU][fU][Ps][mU][Ps][fA][3xGalNac] |
| 1018 | 14218_ | C5-m-68 | [5Phos][mU][Ps][fG][Ps][mA][fA][mU][fU][mU][fU][mG][fG][mU][fU][m |
| | 24218 | | C][fU][Ps][mG][Ps][fC][Ps][mU][Ps][fC][Ps][mU][Ps][mA][fG][mA][fA |
| | | | ][mC][fC][mA][fA][mA][fA][mU][fU][Ps][mC][Ps][fA][3xGalNac] |
| 1019 | 14219_ | C5-m-69 | [5Phos][mU][Ps][fG][Ps][mU][fC][mA][fU][mU][fU][mU][fA][mU][fA][m |
| | 24219 | | A][fU][Ps][mU][Ps][fA][Ps][mU][Ps][fG][Ps][mU][Ps][mA][fU][mU][fA |
| | | | ][mU][fA][mA][fA][mA][fU][mG][fA][Ps][mC][Ps][fA][3xGalNac] |
| 1020 | 14220_ | C5-m-70 | [5Phos][mU][Ps][fC][Ps][mA][fA][mA][fU][mC][fC][mU][fG][mU][fA][m |
| | 24220 | | C][fU][Ps][mG][Ps][fA][Ps][mC][Ps][fA][Ps][mA][Ps][mA][fG][mU][fA |
| | | | ][mC][fA][mG][fG][mA][fU][mU][fU][Ps][mG][Ps][fA][3xGalNac] |
| 1021 | 14221_ | C5-m-71 | [5Phos][mU][Ps][fG][Ps][mA][fU][mA][fA][mC][fU][mU][fU][mU][fA][m |
| | 24221 | | A][fU][Ps][mA][Ps][fG][Ps][mA][Ps][fG][Ps][mA][Ps][mA][fU][mU][fA |
| | | | ][mA][fA][mA][fG][mU][fU][mA][fU][Ps][mC][Ps][fA][3xGalNac] |
| 1022 | 14222_ | C5-m-72 | [5Phos][mU][Ps][fU][Ps][mU][fA][mA][fG][mU][fC][mU][fU][mC][fU][mC |
| | 24222 | | ][fU][Ps][mU][Ps][fA][Ps][mU][Ps][fU][Ps][mC][Ps][mA][fG][mA][fG] |
| | | | [mA][fA][mG][fA][mC][fU][mU][fA][Ps][mA][Ps][fA][3xGalNac] |
| 1023 | 14223_ | C5-m-73 | [5Phos][mU][Ps][fA][Ps][mU][fA][mA][fU][mU][fC][mC][fA][mA][fU][m |
| | 24223 | | A][fU][Ps][mG][Ps][fA][Ps][mU][Ps][fC][Ps][mA][Ps][mA][fU][mA][fU |
| | | | ][mU][fG][mG][fA][mA][fU][mU][fA][Ps][mU][Ps][fA][3xGalNac] |
| 1024 | 14224_ | C5-m-74 | [5Phos][mU][Ps][fG][Ps][mA][fU][mA][fA][mA][fU][mG][fA][mA][fC][m |
| | 24224 | | A][fU][Ps][mG][Ps][fG][Ps][mC][Ps][fC][Ps][mU][Ps][mA][fU][mG][fU |
| | | | ][mU][fC][mA][fU][mU][fU][mA][fU][Ps][mC][Ps][fA][3xGalNac] |
| 1025 | 14225_ | C5-m-75 | [5Phos][mU][Ps][fA][Ps][mA][fG][mG][fU][mU][fC][mA][fU][mC][fA][m |
| | 24225 | | U][fU][Ps][mU][Ps][fU][Ps][mC][Ps][fU][Ps][mU][Ps][mA][fA][mU][fG |
| | | | ][mA][fU][mG][fA][mA][fC][mC][fU][Ps][mU][Ps][fA][3xGalNac] |
| 1026 | 14226_ | C5-m-76 | [5Phos][mU][Ps][fG][Ps][mG][fA][mA][fG][mU][fG][mC][fU][mA][fU][m |
| | 24226 | | A][fA][Ps][mA][Ps][fA][Ps][mC][Ps][fA][Ps][mU][Ps][mU][fU][mA][fU |
| | | | ][mA][fG][mC][fA][mC][fU][mU][fC][Ps][mC][Ps][fA][3xGalNac] |
| 1027 | 14227_ | C5-m-77 | [5Phos][mU][Ps][fC][Ps][mA][fA][mG][fU][mA][fC][mU][fC][mU][fU][m |
| | 24227 | | A][fA][Ps][mA][Ps][fG][Ps][mC][Ps][fA][Ps][mA][Ps][mU][fU][mA][fA |
| | | | ][mG][fA][mG][fU][mA][fC][mU][fU][Ps][mG][Ps][fA][3xGalNac] |
| 1028 | 14228_ | C5-m-78 | [5Phos][mU][Ps][fC][Ps][mC][fA][mA][fU][mG][fA][mU][fU][mU][fC][m |
| | 24228 | | C][fU][Ps][mG][Ps][fU][Ps][mU][Ps][fU][Ps][mC][Ps][mA][fG][mG][fA |
| | | | ][mA][fA][mU][fC][mA][fU][mU][fG][Ps][mG][Ps][fA][3xGalNac] |
| 1029 | 14229_ | C5-m-79 | [5Phos][mU][Ps][fA][Ps][mU][fG][mG][fU][mA][fU][mA][fU][mU][fC][m |
| | 24229 | | A][fU][Ps][mU][Ps][fU][Ps][mC][Ps][fC][Ps][mA][Ps][mA][fU][mG][fA |
| | | | ][mA][fU][mA][fU][mA][fC][mC][fA][Ps][mU][Ps][fA][3xGalNac] |
| 1030 | 14230_ | C5-m-80 | [5Phos][mU][Ps][fA][Ps][mA][fC][mA][fA][mG][fA][mU][fG][mA][fA][m |
| | 24230 | | C][fU][Ps][mU][Ps][fC][Ps][mC][Ps][fC][Ps][mA][Ps][mA][fG][mU][fU] |
| | | | [mC][fA][mU][fC][mU][fU][mG][fU][Ps][mU][Ps][fA][3xGalNac] |
| 1031 | 14231_ | C5-m-81 | [5Phos][mU][Ps][fG][Ps][mA][fA][mC][fU][mU][fC][mA][fG][mG][fA][m |
| | 24231 | | A][fU][Ps][mU][Ps][fU][Ps][mU][Ps][fA][Ps][mG][Ps][mA][fU][mU][fC] |
| | | | [mC][fU][mG][fA][mA][fG][mU][fU][Ps][mC][Ps][fA][3xGalNac] |
| 1032 | 14232_ | C5-m-82 | [5Phos][mU][Ps][fA][Ps][mG][fU][mC][fU][mU][fC][mU][fC][mU][fU][m |
| | 24232 | | A][fU][Ps][mU][Ps][fC][Ps][mC][Ps][fA][Ps][mA][Ps][mA][fU][mA][fA |
| | | | ][mG][fA][mG][fA][mA][fG][mA][fC][Ps][mU][Ps][fA][3xGalNac] |
| 1033 | 14233_ | C5-m-83 | [5Phos][mU][Ps][fA][Ps][mA][fU][mG][fU][mU][fU][mA][fU][mA][fC][mU |
| | 24233 | | ][fU][Ps][mU][Ps][fG][Ps][mA][Ps][fU][Ps][mA][Ps][mA][fA][mG][fU] |
| | | | [mA][fU][mA][fA][mA][fC][mA][fU][Ps][mU][Ps][fA][3xGalNac] |
| 1034 | 14234_ | C5-m-84 | [5Phos][mU][Ps][fC][Ps][mG][fG][mA][fA][mU][fC][mG][fU][mA][fC][m |
| | 24234 | | A][fC][Ps][mA][Ps][fA][Ps][mA][Ps][fG][Ps][mG][Ps][mG][fU][mG][fU |
| | | | ][mA][fC][mG][fA][mU][fU][mC][fC][Ps][mG][Ps][fA][3xGalNac] |
| 1035 | 14235_ | C5-m-85 | [5Phos][mU][Ps][fA][Ps][mU][fA][mC][fC][mU][fC][mU][fG][mC][fU][m |
| | 24235 | | C][fU][Ps][mU][Ps][fC][Ps][mU][Ps][fG][Ps][mA][Ps][mA][fG][mA][fG |
| | | | ][mC][fA][mG][fA][mG][fG][mU][fA][Ps][mU][Ps][fA][3xGalNac] |
| 1036 | 14236_ | C5-m-86 | [5Phos][mU][Ps][fA][Ps][mU][fC][mA][fA][mU][fU][mU][fC][mU][fU][m |
| | 24236 | | C][fU][Ps][mA][Ps][fC][Ps][mC][Ps][fA][Ps][mU][Ps][mA][fG][mA][fA |
| | | | ][mG][fA][mA][fA][mU][fU][mG][fA][Ps][mU][Ps][fA][3xGalNac] |
| 1037 | 14237_ | C5-m-87 | [5Phos][mU][Ps][fA][Ps][mA][fC][mA][fU][mU][fG][mU][fG][mU][fU][m |
| | 24237 | | U][fU][Ps][mG][Ps][fC][Ps][mA][Ps][fU][Ps][mU][Ps][mA][fA][mA][fA |
| | | | ][mC][fA][mC][fA][mA][fU][mG][fU][Ps][mU][Ps][fA][3xGalNac] |
| 1038 | 14238_ | C5-m-88 | [5Phos][mU][Ps][fA][Ps][mA][fC][mU][fU][mU][fA][mU][fA][mA][fG][m |
| | 24238 | | C][fA][Ps][mU][Ps][fA][Ps][mU][Ps][fG][Ps][mC][Ps][mU][fG][mC][fU |
| | | | ][mU][fA][mU][fA][mA][fA][mG][fU][Ps][mU][Ps][fA][3xGalNac] |
| 1039 | 14239_ | C5-m-89 | [5Phos][mU][Ps][fA][Ps][mG][fG][mA][fU][mA][fA][mC][fU][mU][fU][m |
| | 24239 | | U][fA][Ps][mA][Ps][fU][Ps][mA][Ps][fG][Ps][mA][Ps][mU][fA][mA][fA |
| | | | ][mA][fG][mU][fU][mA][fU][mC][fC][Ps][mU][Ps][fA][3xGalNac] |
| 1040 | 14240_ | C5-m-90 | [5Phos][mU][Ps][fU][Ps][mU][fU][mA][fU][mU][fG][mG][fU][mU][fG][m |
| | 24240 | | A][fU][Ps][mA][Ps][fC][Ps][mU][Ps][fG][Ps][mU][Ps][mA][fU][mC][fA |
| | | | ][mA][fC][mC][fA][mA][fU][mA][fA][Ps][mA][Ps][fA][3xGalNac] |
| 1041 | 14241_ | C5-m-91 | [5Phos][mU][Ps][fG][Ps][mC][fA][mA][fC][mU][fG][mU][fU][mU][fU][m |
| | 24241 | | C][fU][Ps][mU][Ps][fC][Ps][mU][Ps][fG][Ps][mG][Ps][mA][fG][mA][fA |
| | | | ][mA][fA][mC][fA][mG][fU][mU][fG][Ps][mC][Ps][fA][3xGalNac] |
| 1042 | 14242_ | C5-m-92 | [5Phos][mU][Ps][fG][Ps][mC][fU][mU][fU][mG][fA][mU][fA][mC][fA][m |
| | 24242 | | A][fC][Ps][mU][Ps][fU][Ps][mC][Ps][fC][Ps][mA][Ps][mG][fU][mU][fG |
| | | | ][mU][fA][mU][fC][mA][fA][mA][fG][Ps][mC][Ps][fA][3xGalNac] |
| 1043 | 14243_ | C5-m-93 | [5Phos][mU][Ps][fC][Ps][mA][fA][mA][fG][mC][fU][mU][fC][mU][fC][m |
| | 24243 | | U][fC][Ps][mU][Ps][fU][Ps][mC][Ps][fA][Ps][mA][Ps][mG][fA][mG][fA] |
| | | | [mG][fA][mA][fG][mC][fU][mU][fU][Ps][mG][Ps][fA][3xGalNac] |
| 1044 | 14244_ | C5-m-94 | [5Phos][mU][Ps][fG][Ps][mG][fA][mA][fC][mU][fC][mC][fU][mU][fU][m |
| | 24244 | | C][fG][Ps][mU][Ps][fC][Ps][mU][Ps][fG][Ps][mC][Ps][mC][fG][mA][fA |
| | | | ][mA][fG][mG][fA][mG][fU][mU][fC][Ps][mC][Ps][fA][3xGalNac] |
| 1045 | 14245_ | C5-m-95 | [5Phos][mU][Ps][fA][Ps][mU][fG][mA][fC][mA][fG][mU][fU][mC][fU][m |
| | 24245 | | U][fU][Ps][mG][Ps][fA][Ps][mC][Ps][fU][Ps][mG][Ps][mA][fA][mA][fG |
| | | | ][mA][fA][mC][fU][mG][fU][mC][fA][Ps][mU][Ps][fA][3xGalNac] |
| 1046 | 14246_ | C5-m-96 | [5Phos][mU][Ps][fU][Ps][mG][fC][mA][fG][mA][fA][mU][fA][mA][fC][m |
| | 24246 | | A][fU][Ps][mG][Ps][fU][Ps][mC][Ps][fC][Ps][mA][Ps][mA][fU][mG][fU |
| | | | ][mU][fA][mU][fU][mC][fU][mG][fC][Ps][mA][Ps][fA][3xGalNac] |
| 1047 | 14247_ | C5-m-97 | [5Phos][mU][Ps][fA][Ps][mG][fA][mA][fG][mU][fC][mC][fU][mA][fU][m |
| | 24247 | | A][fG][Ps][mU][Ps][fU][Ps][mG][Ps][fU][Ps][mA][Ps][mC][fU][mA][fU |
| | | | ][mA][fG][mG][fA][mC][fU][mU][fC][Ps][mU][Ps][fA][3xGalNac] |
| 1048 | 14248_ | C5-m-98 | [5Phos][mU][Ps][fA][Ps][mU][fA][mA][fC][mU][fU][mU][fU][mA][fA][m |
| | 24248 | | U][fA][Ps][mG][Ps][fA][Ps][mG][Ps][fA][Ps][mU][Ps][mU][fA][mU][fU |
| | | | ][mA][fA][mA][fA][mG][fU][mU][fA][Ps][mU][Ps][fA][3xGalNac] |
| 1049 | 14249_ | C5-m-99 | [5Phos][mU][Ps][fC][Ps][mU][fA][mA][fG][mA][fU][mU][fU][mC][fU][m |
| | 24249 | | U][fU][Ps][mU][Ps][fC][Ps][mC][Ps][fA][Ps][mA][Ps][mA][fA][mA][fG |
| | | | ][mA][fA][mA][fU][mC][fU][mU][fA][Ps][mG][Ps][fA][3xGalNac] |
| 1050 | 14250_ | C5-m-100 | [5Phos][mU][Ps][fA][Ps][mU][fA][mA][fA][mU][fG][mA][fA][mC][fA][m |
| | 24250 | | U][fG][Ps][mG][Ps][fC][Ps][mC][Ps][fU][Ps][mG][Ps][mC][fA][mU][fG |
| | | | ][mU][fU][mC][fA][mU][fU][mU][fA][Ps][mU][Ps][fA][3xGalNac] |

Note =
each of the above constructs may or may not have a phosphate modification at the 5′ end group. Furthermore, and independently, each of the above constructs may or may not have a “3x GalNAc” coupled to the 3′ end group. Optional are constructs with a 3x GalNAc ligand, in particular a toothbrush ligand as defined herein. Particularly optional are constructs which in addition have a 5′ phosphate, even though this is not a strict requirement, given that in the absence thereof, mammalian cells will add such phosphate in case it is absent from the molecule as administered.

[0387] Specific notes about the nomenclature in Tables 3a to 3c:
[0388] fN: 2′-Fluoro residues
[0389] mN: 2′-O-methyl residues
[0390] Ps: phosphorothioate
[0391] p, Phos: phosphate
[0392] (GalNAc): Sirnaomics mono-GalNAc building block

[0393] It should also be noted that the scope of the present disclosure extends to sequences that correspond to those in the Tables above, and wherein the 5′ terminal nucleoside of the antisense (guide) strand (first region as defined in the claims herein) can include any nucleobase that can be present in an RNA molecule, in other words can be any of adenine (A), uracil (U), guanine (G) or cytosine (C). Additionally, the scope of the present disclosure extends to sequences that correspond to those in the Tables above, and wherein the 3′ terminal nucleoside of the sense (passenger) strand (second region as defined in the claims herein) can include any nucleobase that can be present in an RNA molecule, in other words can be any of adenine (A), uracil (U), guanine (G) or cytosine (C), optionally however a nucleobase that is complementary to the 5′ nucleobase of the antisense (guide) strand (first region as defined in the claims herein).

[0394] While the methods are shown and described as being a series of acts that are performed in a particular sequence, it is to be understood and appreciated that the methods are not limited by the order of the sequence. For example, some acts can occur in a different order than what is described herein. In addition, an act can occur concurrently with another act. Further, in some instances, not all acts may be required to implement a method described herein.

[0395] The order of the steps of the methods described herein is exemplary, but the steps may be carried out in any suitable order, or simultaneously where appropriate. Additionally, steps may be added or substituted in, or individual steps may be deleted from any of the methods without departing from the scope of the subject matter described herein. Aspects of any of the Examples described above may be combined with aspects of any of the other Examples described to form further Examples.

[0396] It will be understood that the above description of an optional embodiment is given by way of example only and that various modifications may be made by those skilled in the art. What has been described above includes Examples of one or more embodiments. It is, of course, not possible to describe every conceivable modification and alteration of the above compounds, compositions or methods for purposes of describing the aforementioned aspects, but one of ordinary skill in the art can recognize that many further modifications and permutations of various aspects are possible. Accordingly, the described aspects are intended to embrace all such alterations, modifications, and variations that fall within the scope of the appended claims.

### EXAMPLES

[0397] The following Examples illustrate certain embodiments of the present disclosure and are not limiting. Moreover, where specific embodiments are provided, the inventors have contemplated generic application of those specific embodiments. For example, disclosure of an oligonucleotide having a particular motif or modification patterns provides reasonable support for additional oligonucleotides having the same or similar motif or modification patterns.

[0398] The syntheses of the RNAi constructs according to the present disclosure and disclosed herein have been carried out using synthesis methods known to the person skilled in the art, such as synthesis methods disclosed in https://en.wikipedia.org/wiki/Oligonucleotide_synthesis {retrieved on 16 Feb. 2022}, wherein the methods disclosed on this website are incorporated by reference herein in their entirety. The only difference to the synthesis method disclosed in this reference is that GalNAc phosphoramidite immobilized on a support is used in the synthesis method during the first synthesis step.

### Example 1

### Materials and Methods

### Cell Culture:

[0399] Human primary hepatocytes (5 donor pooled-Sekisui XenoTech, HPCH05+) were thawed immediately prior to experimentation and cultured in 1× complete Williams medium (Gibco, A1217601) supplemented with Hepatocytes plating supplement pack (Gibco, CM3000). FBS concentration was modified from manufacture recipe to a final 2.5% (as opposed to 5%) for compound stability.

[0400] 1× Complete WEM: 2.5% FBS, 1 μM Dexamethasone, Pen/Strep (100 U/mL/100 μg/mL), 4 μg/ml Human Insulin, 2 mM GlutaMAX, 15 mM HEPES, pH 7.4.

### C5 Target Identification and Duplex Preparation:

[0401] Oligomeric compounds targeting C5 were identified by bioinformatic analysis on human C5 mRNA sequence as given in RefSeq sequence ID NM_001735.2. 100 compounds were selected for synthesis as mxRNA hairpins. Compounds were dissolved to 50 μM in molecular biology grade water. Duplexes were annealed by heating at 95° C. for 5 minutes followed by gradual cooling to room temperature. mxRNAs were annealed by heating at 95° C. for 5 minutes followed by rapid cooling on ice.

### C5—Primary Screen:

[0402] On the day of transfection, primary human hepatocytes were thawed in 45 mL of human OptiThaw (Sekisui XenoTech, K8000) and centrifuged down at 200 g for 5 minutes. Cells were resuspended in 2× complete WEM and counted. Cells were then plated in 50 μL of 2× complete WEM at 25,000 cells per well on 96 well type 1 rat tail Collagen plates and allowed to rest and attach for four hours before transfection. After rest, the compounds were diluted further to 2 μM in basal WEM. 50 μL of each 2 μM compound was added to respective triplicates of the plated hepatocytes for a final concentration of 1 μM in a volume of 100 μL 1× complete WEM.

[0403] 72 hours post transfection, cells were harvested, and RNA isolated using the PureLink Pro 96 total RNA Purification Kit (ThermoFisher, 12173011A) according to the manufacturer protocol. Harvested RNA was assayed for C5 expression via Taqman qPCR using the Luna Universal Probe One-Step RT-qPCR Kit (NEB, E3006). A qPCR assay was performed for each sample using a C5 TaqMan probe set (Hs01004342_m1-FAM) multiplexed with a common GAPDH VIC probe (ThermoFisher, 4326317E). Thermocycling and data acquisition was performed with an Applied Biosystems QuantStudio 3/5 Real-Time PCR System.

### C5—Secondary Screen:

[0404] Based on data from the primary screen, a narrower set of the best performing 25 C5-targeting mxRNA constructs were tested in dose curves. Compounds were diluted further to 2 μM in basal WEM. A seven step, five-fold dilution series was prepared in basal WEM from 2 μM to 0.000128 μM. 50 μL of each dilution was added to respective triplicates of the plated hepatocytes for a final dilution series of 1 μM down to 0.000064 M in a volume of 100 μL 1× complete WEM.

[0405] 72 hours post transfection, cells were harvested, and RNA isolated using the PureLink Pro 96 total RNA Purification Kit (ThermoFisher, 12173011A) according to the manufacturer protocol. Harvested RNA was assayed for C5 expression via Taqman qPCR using the Luna Universal Probe One-Step RT-qPCR Kit (NEB, E3006). A qPCR assay was performed for each sample using a C5 TaqMan probe set (Hs01004342_m1-FAM) multiplexed with a common GAPDH VIC probe (ThermoFisher, 4326317E). Thermocycling and data acquisition was performed with an Applied Biosystems QuantStudio 3/5 Real-Time PCR System.

### Example 2

### Results

[0406] FIG. 1 shows results of the primary screening of selected compounds according to the present disclosure and their activity in inhibiting C5 expression.

[0407] Table 4 below shows IC50 values (in nM) for 25 optional constructs selected in accordance with the Examples. Max % KD indicates the maximally achieved knock-down at 1000 nM with 0% being no knock-down and 100% full knock-down. M4K4 was used as reference.

| Experimental | | |
|---|---|---|
| denotiation | Max % KD | IC50 |
| C5-m-30 | 71.88574381 | 4.943 |
| C5-m-37 | 77.48131233 | 11.25 |
| C5-m-83 | 59.57363723 | 21.99 |
| C5-m-61 | 68.93837532 | 40.04 |
| C5-m-74 | 63.30023809 | 41.25 |
| C5-m-82 | 62.26208156 | 68.84 |
| C5-m-87 | 63.87542555 | 89.55 |
| C5-m-55 | 63.0068919 | 90.72 |
| C5-m-23 | 60.00147173 | 213.2 |
| C5-m-28 | 50.59311869 | 295.4 |
| C5-m-42 | 49.72928101 | 302.6 |
| C5-m-73 | 48.77874599 | 351.7 |
| C5-m-66 | 56.30345942 | 351.9 |
| C5-m-47 | 53.46576404 | 367.2 |
| C5-m-46 | 50.25328616 | 416.7 |
| C5-m-27 | 48.71998765 | 583.3 |
| C5-m-16 | 50.77488697 | 629.7 |
| C5-m-43 | 43.01211645 | 779.6 |
| C5-m-36 | 48.1079184 | 894.2 |
| C5-m-72 | 44.02312363 | 1090 |
| C5-m-53 | 40.3528029 | 1167 |
| C5-m-14 | 38.57830035 | 2282 |
| C5-m-75 | 38.99786713 | 3485 |
| C5-m-59 | 32.76891127 | 5167 |
| C5-m-56 | 22.82809496 | 6117 |
| M4K4 | 11.680749 | 3810 |

[0408] The IC50 data in the single- to low double-digit nanomolar range demonstrate outstanding performance of numerous constructs of the disclosure. Furthermore, no obvious toxicity was observed.

[0409] Further results of the screening and the outstanding performance of the above inventive constructs in Table 4 above are shown in FIG. 2.

[0410] Table 5 below shows IC50 values (in nM) for 6 optional constructs selected in accordance with the Examples. Max % KD indicates the maximally achieved knock-down at 1000 nM with 0% being no knock-down and 100% full knock-down.

| | Experimental | | |
|---|---|---|---|
| SEQ ID No. | denotation | KD % at 1000 nM | IC50 (nM) |
| 980 | C5-30 (large) | 85.136214 | 2.939 |
| 987 | C5-37 (large) | 85.717658 | 5.605 |
| 1033 | C5-83 (large) | 71.592597 | 37.45 |

[0411] Further results of the constructs in Table 5 above with different concentrations are shown in FIG. 3.

[0412] Table 5 and FIG. 3 show C5 large scale preparations mirrored the screening synthesis very closely. C5-m-30 and C5-m-37 had 85% knockdowns and C5-m-83 had a 72% knockdown at the highest dose.

### Example 3

[0413] Complement component C5 targeting mxRNA Leads for Candidate Dose and Duration Response study in humanized liver-uPA-SCID mice) model, non-GLP

### 1. Study Objective(s)

[0414] The objective of this non-GLP study is to evaluate the dose and duration response of GalNAc conjugated complement component C5 targeting mxRNA constructs in humanized liver-uPA-SCID. The compound(s) will be administered subcutaneously, and the mice will be survived for up to 42 days.

[0415] Prior to necropsy, plasma and serum will be collected. At necropsy, 3 liver biopsies (2 mm) per animal will be preserved in separate vials in RNAlater, flash frozen, and stored at −80° C. Three more liver biopsies (2 mm) will be taken, flash frozen in the same vial, and stored at −80° C.

### 2. Regulatory Compliance

[0416] This non-GLP study will not be conducted in accordance with the Food and Drug Administration's Good Laboratory Practice (GLP) regulations (21 CFR Part 58).

### 3. Animal Welfare Compliance

[0417] This protocol has been reviewed and approved by the Test Facility IACUC Committec.

### 4. Test System Information

### 4.1. Animal Test

[0418] 4.1.1. Common Name: Mouse
[0419] 4.1.2. Breed/Class: Rodent-humanized liver-uPA-SCID mice model
[0420] 4.1.3. Number of Animals (by gender): 44 Male all naïve

### 4.2. Acclimation Period:

[0421] 4.2.1. Duration:

[0422] All animals will be acclimated for a minimum period of five (5) days prior to release by the Attending veterinarian, at which time the overall health of the animals will be evaluated.
[0423] 4.2.2. Required medication and/or vaccination:
   [0424] All rodents received will come from a vendor that is certified to be free of any lethal parasites that may affect the facility's total colony.
   [0425] All rodents must be accompanied by a sentinel report including statistical analysis.
   [0426] Each shipment of rodents must be housed separately from others in the facility.

### 4.3. Animal Identification Method and Location:

[0427] Animals will be assigned sequential numbers. The animals will be car notched by the vendor prior to shipment to permanently identify each animal. Animals may have color markings to distinguish between similar ear notches. A cage card will also be affixed to each animal cage denoting the animal number, gender, vendor, strain, study director, and study number.

### 5. Study Design

### 5.1. Design Details

[0428] This study will have one type of mice, N=44. Animals will be grouped by treatment type, dosage, and survival period. Each animal will be treated by subcutaneous injection of test material. See study table 1 for details.

[0429] At necropsy, three 2 mm biopsy punches will be taken from the left, middle and right liver lobes, placed in separate vials, soaked in RNAlater for 15 minutes, flash frozen and stored at −80° C. Another three 2 mm liver biopsies from the left, middle and right liver lobes will be placed into one vial, flash frozen and stored at −80° C. The rest of the liver will be flash frozen and stored in 10 ml conical tubes at −80° C.

[0430] The study schedule is shown in FIG. 4.

TABLE 6
Dose information

| Terminal | Control | C5-30 | C5-37 |
|---|---|---|---|
| Timepoint | (PBS) | (SEQ ID No. 980) | (SEQ ID No. 987) |
| Week 2 | Group | Group 2A | Group 3A |
| | 1A | (10 mg/kg) | (10 mg/kg) |
| | (N = 4) | (N = 4) | (N = 4) |
| | | Group 2B | Group 3B |
| | | (30 mg/kg) | (30 mg/kg) |
| | | (N = 4) | (N = 4) |
| Week 6 | Group | Group 2C | Group 3C |
| | 1B | (10 mg/kg) | (10 mg/kg) |
| | (N = 4) | (N = 4) | (N = 4) |
| | | Group 2D | Group 3D |
| | | (30 mg/kg) | (30 mg/kg) |
| | | (N = 3) | (N = 3) |
| | | Group 2E | Group 3E |
| | | 2x (10 mg/kg) | 2x (10 mg/kg) |
| | | (N = 3) | (N = 3) |

TABLE 7
Study table

| | Number | Treatment | | | Pre- |
|---|---|---|---|---|---|
| | of | Subcutaneous | TX | Survival | Euthanasia |
| Group | Animals | Injection | Daysq | Days | and Necropsy |
| 1A | 4 | Control (PBS) | 0 | 14 | Pre- |
| 1B | 4 | Control (PBS) | 0 | 42 | Euthanasia: |
| 2A | 4 | C5-30 (10 mg/kg) | 0 | 14 | Plasma and |
| 2B | 4 | C5-30 (30 m/kg) | 0 | 14 | serum |
| 2C | 4 | C5-30 (10 m/kg) | 0 | 42 | collection. |
| 2D | 3 | C5-30 (30 m/kg) | 0 | 42 | Necropsy: |
| 2E | 3 | C5-30 (10 m/kg) | 0, 7 | 42 | 2 mm biopsy |
| 3A | 4 | C5-37 (10 mg/kg) | 0 | 14 | of left, middle |
| 3B | 4 | C5-37 (30 mg/kg) | 0 | 14 | and right liver |
| 3C | 4 | C5-37 (10 mg/kg) | 0 | 42 | lobes in |
| 3D | 3 | C5-37 (30 mg/kg) | 0 | 42 | separate |
| 3E | 3 | C5-37 (10 mg/kg) | 0, 7 | 42 | vials, in |
| Spares | 0 | | | | RNAlater for |
| Total | 44 | | | | 15 min, flash |
| | | | | | freeze then |
| | | | | | stored |
| | | | | | at −80° C. |
| | | | | | 2 mm biopsy |
| | | | | | of left, middle |
| | | | | | and right liver |
| | | | | | all in one vial, |
| | | | | | flash freeze |
| | | | | | then stored |
| | | | | | at −80° C. |
| | | | | | Rest of liver, |
| | | | | | flash freeze |
| | | | | | then stored |
| | | | | | at −80° C. |

### 6. Test Article and Ancillary Material Information

### 6.1. Test Drug 1:

[0431] 6.1.1. Identification: C5-30 (SEQ ID No. 980)
[0432] 6.1.2. Manufacturer: Sirnaomics
[0433] 6.1.3. Description: GalNAc conjugated human Complement component C5 targeting mxRNA
[0434] 6.1.4. Lot/Batch Number: Will be recorded on study materials form.
[0435] 6.1.5. Expiration Date: Will be recorded on study materials form.
[0436] 6.1.6. Storage Temperature: 4° C.
[0437] 6.1.7. Bio-Hazard Status: None
[0438] 6.1.8. MSDS*: TBD
[0439] 6.1.9. Appearance: Clear Liquid
[0440] 6.1.10. Dose Information: See Table 6
[0441] 6.1.11. Residual Test Article Storage: None

### 6.2. Test Drug 2:

[0442] 6.2.1. Identification: C5-37
[0443] 6.2.2. Manufacturer: Sirnaomics
[0444] 6.2.3. Description: GalNAc conjugated human Complement component C5 targeting mxRNA
[0445] 6.2.4. Lot/Batch Number: Will be recorded on study materials form.
[0446] 6.2.5. Expiration Date: Will be recorded on study materials form.
[0447] 6.2.6. Storage Temperature: 4° C.
[0448] 6.2.7. Bio-Hazard Status: None
[0449] 6.2.8. MSDS*: TBD
[0450] 6.2.9. Appearance: Clear Liquid
[0451] 6.2.10. Dose Information: See Table 6
[0452] 6.2.11. Residual Test Article Storage: None

### Results

[0453] Results of the C5 gene knock down by constructs C5-30 and C5-37 in humanized liver-uPA-SCID mice are shown in the Tables below.

Table 8a: Results of C5 gene knockdown for construct C5-30 (see Table 3c for structure) at several time points using different doses

| C5-30 (SEQ ID No. 980) | |
|---|---|
| Single Tx - 10 mg/kg | 51% KD at 2 weeks |
| | 10% KD at 6 weeks |
| Single Tx - 30 mg/kg | 61% KD at 2 weeks |
| | 36% KD at 6 weeks |
| Repeat 2x Tx - 10 mg/kg | 17% KD at 6 weeks |

Table 8b: Results of C5 gene knockdown for construct C5-37 (see Table 3c for structure) at several time points using different doses

| C5-37 (SEQ ID No. 987) | |
|---|---|
| Single Tx - 10 mg/kg | 50% KD at 2 weeks |
| | 27% KD at 6 weeks |
| Single Tx - 30 mg/kg | 54% KD at 2 weeks |
| | 47% KD at 6 weeks |
| Repeat 2x Tx - 10 mg/kg | 40% KD at 6 weeks |

[0454] The results of the mouse study are also shown in FIG. 5.

### Example 4

Evaluation of Duration Effect of Human Complement C5 Targeting mxRNA, in the Humanized Liver-uPA-SCID Mouse Model, Non-GLP.

[0455] The protocol is represented in its original wording. Therefore, any use of future tense of verbs means that the experiments have already been carried out.

### 1. Study Objective(s)

[0456] The objective of this non-GLP study is to evaluate, in humanized liver-uPA-SCID mice the duration effect of C5-30 mxRNA compound (see Table 3c; experimental denotation: C5-m-30 SEQ ID No. 980) targeting human complement C5 mRNA.

[0457] The compound(s) will be administered subcutaneously, and the mice will be survived for up to 84 days.

### 2. Study Design

### 2.1. Design Details

[0458] This study will have one type of mice, PXB. Animals will be grouped by treatment type, dosage, and survival period. Each animal will be treated by subcutaneous injection of test material. (Note: that the injection must be given subcutaneously. The test articles will not be functional if the subcutaneous site is missed, and injection is given within the muscular region or test articles are injected into the vein/bloodstream).
[0459] Group 1A, 1B, 1C, and 1D will have five animals and receive a single control dose of PBS.
[0460] Group 2A, 2B, 2C, and 2D will have five animals and receive a single dose of C5-30 (mxRNA targeting human complement C5 mRNA, SEQ ID No. 980) at 30 mg/kg.

[0461] Animals will be survived for 14, 28, 56, and 84 days. See FIG. 6 and Table 9 for details.

TABLE 9
Study Table

| | | | Treatment | | | |
|---|---|---|---|---|---|---|
| | Number | | Subcutaneous | | | |
| | of | Mouse | Injection | Survival | | Pre-Euthanasia and |
| Group | Animals | Type | Day 0 | Days | Blood | Necropsy |
| 1A | 5 | PXB | Control (PBS) | 14 | Blood collected | Pre-Euthanasia: Plasma |
| 1B | 5 | PXB | Control (PBS) | 28 | for plasma. | and collection. |
| 1C | 5 | PXB | Control (PBS) | 56 | Plasma will be | Necropsy: |
| 1D | 5 | PXB | Control (PBS) | 84 | evenly separated | 2 mm biopsy of left, middle |
| 2A | 5 | PXB | C5-30 30 mg/kg | 14 | into two labeled | and right liver lobes in |
| 2B | 5 | PXB | C5-30 30 mg/kg | 28 | vials. | separate vials, in RNAlater |
| 2C | 5 | PXB | C5-30 30 mg/kg | 56 | | for 15 min, flash freeze then |
| 2D | 5 | PXB | C5-30 30 mg/kg | 84 | | stored at −80° C. |
| | | | | | | 2 mm biopsy of left, middle |
| | | | | | | and right liver all in one vial, |
| | | | | | | flash freeze then stored at −80° C. |
| | | | | | | Rest of liver, flash freeze |
| | | | | | | then stored at −80° C. |

Note = The structure of C5-30 is shown in Table 3c under the experimental denotation “C5-m-30”.

### 3. Test Article and Ancillary Material Information

### 3.1. Test Drug 1:

[0462] 3.1.1. Identification: C5-30
[0463] 3.1.2. Manufacturer: Sirnaomics
[0464] 3.1.3. Description: GalNAc-mxRNA targeting human complement C5 mRNA
[0465] 3.1.4. Lot/Batch Number: Will be recorded on study materials form.
[0466] 3.1.5. Expiration Date: Will be recorded on study materials form.
[0467] 3.1.6. Storage Temperature: 4° C.
[0468] 3.1.7. Bio-Hazard Status: None
[0469] 3.1.8. SDS*: TBD
[0470] 3.1.9. Appearance: Clear Liquid
[0471] 3.1.10. Dose Information: See Table 1
[0472] 3.1.11. Residual Test Article Storage: None
   Note=C5-30 is shown in Table 3c under the experimental denotation C5-m-30.

### Results

[0473] The results of the study are shown in FIG. 7.

[0474] FIG. 7 shows the following duration response in terms of knock down (KD) of the C5 gene expression:
[0475] 61% KD of C5 mRNA at week 2;
[0476] 46% KD of C5 mRNA at week 4;
   [0477] 13% KD of C5 mRNA at week 8; and
   [0478] Return to control levels at week 12

### Note:

[0479] 2 animals from control group (8 wk) were found dead (remaining N=4)
[0480] 2 animals from C5-30 (4 wk) group were found dead (remaining N=4)
[0481] 2 animals from C5-30 (8 wk) group were found dead (remaining N=4)

The application's sequence listing, which the Patent Office published only in electronic form, follows.

SEQUENCE LISTING (1050 sequences)

SEQ ID NO: 1 - RNA, 19 nt, synthetic construct
  source 1..19: mol_type = other RNA
acacagtttggcctggaga

SEQ ID NO: 2 - RNA, 19 nt, synthetic construct
  source 1..19: mol_type = other RNA
ggaatcttgaagtcaggaa

SEQ ID NO: 3 - RNA, 19 nt, synthetic construct
  source 1..19: mol_type = other RNA
ctgggcttgtagctggcac

SEQ ID NO: 4 - RNA, 19 nt, synthetic construct
  source 1..19: mol_type = other RNA
tcaagtaattatagtgagt

SEQ ID NO: 5 - RNA, 19 nt, synthetic construct
  source 1..19: mol_type = other RNA
aaacaggtttgtctgtatg

SEQ ID NO: 6 - RNA, 19 nt, synthetic construct
  source 1..19: mol_type = other RNA
gcagacattttaacacaga

SEQ ID NO: 7 - RNA, 19 nt, synthetic construct
  source 1..19: mol_type = other RNA
acctggagctggttgccac

SEQ ID NO: 8 - RNA, 19 nt, synthetic construct
  source 1..19: mol_type = other RNA
gataaaatcaagtaattat

SEQ ID NO: 9 - RNA, 19 nt, synthetic construct
  source 1..19: mol_type = other RNA
gacacagtttggcctggag

SEQ ID NO: 10 - RNA, 19 nt, synthetic construct
  source 1..19: mol_type = other RNA
cggaatcttgaagtcagga

SEQ ID NO: 11 - RNA, 19 nt, synthetic construct
  source 1..19: mol_type = other RNA
agacattttaacacagaac

SEQ ID NO: 12 - RNA, 19 nt, synthetic construct
  source 1..19: mol_type = other RNA
tgaagtcaggaaaagagat

SEQ ID NO: 13 - RNA, 19 nt, synthetic construct
  source 1..19: mol_type = other RNA
cacagtttggcctggagaa

SEQ ID NO: 14 - RNA, 19 nt, synthetic construct
  source 1..19: mol_type = other RNA
aattatagtgagttatttt

SEQ ID NO: 15 - RNA, 19 nt, synthetic construct
  source 1..19: mol_type = other RNA
tccaagtcagatgtctctt

SEQ ID NO: 16 - RNA, 19 nt, synthetic construct
  source 1..19: mol_type = other RNA
tcaggaaaagagataattc

SEQ ID NO: 17 - RNA, 19 nt, synthetic construct
  source 1..19: mol_type = other RNA
ggcaagacatattctttaa

SEQ ID NO: 18 - RNA, 19 nt, synthetic construct
  source 1..19: mol_type = other RNA
gaaggccaatttccagagg

SEQ ID NO: 19 - RNA, 19 nt, synthetic construct
  source 1..19: mol_type = other RNA
caagtaattatagtgagtt

SEQ ID NO: 20 - RNA, 19 nt, synthetic construct
  source 1..19: mol_type = other RNA
ataaaatcaagtaattata

SEQ ID NO: 21 - RNA, 19 nt, synthetic construct
  source 1..19: mol_type = other RNA
atcaagtaattatagtgag

SEQ ID NO: 22 - RNA, 19 nt, synthetic construct
  source 1..19: mol_type = other RNA
gccaatttccagaggaagc

SEQ ID NO: 23 - RNA, 19 nt, synthetic construct
  source 1..19: mol_type = other RNA
agtaattatagtgagttat

SEQ ID NO: 24 - RNA, 19 nt, synthetic construct
  source 1..19: mol_type = other RNA
taaaggtacttgttgttta

SEQ ID NO: 25 - RNA, 19 nt, synthetic construct
  source 1..19: mol_type = other RNA
gactgctgtttcagaatca

SEQ ID NO: 26 - RNA, 19 nt, synthetic construct
  source 1..19: mol_type = other RNA
actgctgtttcagaatcaa

SEQ ID NO: 27 - RNA, 19 nt, synthetic construct
  source 1..19: mol_type = other RNA
atataaaggtacttgttgt

SEQ ID NO: 28 - RNA, 19 nt, synthetic construct
  source 1..19: mol_type = other RNA
tgtaaacagttcctttcaa

SEQ ID NO: 29 - RNA, 19 nt, synthetic construct
  source 1..19: mol_type = other RNA
ggtaactttggctgagaga

SEQ ID NO: 30 - RNA, 19 nt, synthetic construct
  source 1..19: mol_type = other RNA
tatagttgtaaacagttcc

SEQ ID NO: 31 - RNA, 19 nt, synthetic construct
  source 1..19: mol_type = other RNA
acatattctttaacttcaa

SEQ ID NO: 32 - RNA, 19 nt, synthetic construct
  source 1..19: mol_type = other RNA
aagcagtccttttacactc

SEQ ID NO: 33 - RNA, 19 nt, synthetic construct
  source 1..19: mol_type = other RNA
tagtgagttattttgtcaa

SEQ ID NO: 34 - RNA, 19 nt, synthetic construct
  source 1..19: mol_type = other RNA
aggaagacatctttgaaca

SEQ ID NO: 35 - RNA, 19 nt, synthetic construct
  source 1..19: mol_type = other RNA
gcagtccttttacactcaa

SEQ ID NO: 36 - RNA, 19 nt, synthetic construct
  source 1..19: mol_type = other RNA
agttattttgtcaatatat

SEQ ID NO: 37 - RNA, 19 nt, synthetic construct
  source 1..19: mol_type = other RNA
gtacaacagaatatggtat

SEQ ID NO: 38 - RNA, 19 nt, synthetic construct
  source 1..19: mol_type = other RNA
gttattttgtcaatatatg

SEQ ID NO: 39 - RNA, 19 nt, synthetic construct
  source 1..19: mol_type = other RNA
caggcttcaggaaaagagg

SEQ ID NO: 40 - RNA, 19 nt, synthetic construct
  source 1..19: mol_type = other RNA
aggaaaagagataattcca

SEQ ID NO: 41 - RNA, 19 nt, synthetic construct
  source 1..19: mol_type = other RNA
tgttacagcaatataaagg

SEQ ID NO: 42 - RNA, 19 nt, synthetic construct
  source 1..19: mol_type = other RNA
tataagcatatgcaatctc

SEQ ID NO: 43 - RNA, 19 nt, synthetic construct
  source 1..19: mol_type = other RNA
catattctttaacttcaaa

SEQ ID NO: 44 - RNA, 19 nt, synthetic construct
  source 1..19: mol_type = other RNA
aagacatctttgaacacct

SEQ ID NO: 45 - RNA, 19 nt, synthetic construct
  source 1..19: mol_type = other RNA
ccaggaagacatctttgaa

SEQ ID NO: 46 - RNA, 19 nt, synthetic construct
  source 1..19: mol_type = other RNA
tacagcaatataaaggtac

SEQ ID NO: 47 - RNA, 19 nt, synthetic construct
  source 1..19: mol_type = other RNA
cattgtcataggttattgg

SEQ ID NO: 48 - RNA, 19 nt, synthetic construct
  source 1..19: mol_type = other RNA
tgagttattttgtcaatat

SEQ ID NO: 49 - RNA, 19 nt, synthetic construct
  source 1..19: mol_type = other RNA
agtgagttattttgtcaat

SEQ ID NO: 50 - RNA, 19 nt, synthetic construct
  source 1..19: mol_type = other RNA
gtgagttattttgtcaata

SEQ ID NO: 51 - RNA, 19 nt, synthetic construct
  source 1..19: mol_type = other RNA
gaattttccttgaaagatc

SEQ ID NO: 52 - RNA, 19 nt, synthetic construct
  source 1..19: mol_type = other RNA
actgttacagcaatataaa

SEQ ID NO: 53 - RNA, 19 nt, synthetic construct
  source 1..19: mol_type = other RNA
aaatccattgtcataggtt

SEQ ID NO: 54 - RNA, 19 nt, synthetic construct
  source 1..19: mol_type = other RNA
aatccattgtcataggtta

SEQ ID NO: 55 - RNA, 19 nt, synthetic construct
  source 1..19: mol_type = other RNA
gagaaatccattgtcatag

SEQ ID NO: 56 - RNA, 19 nt, synthetic construct
  source 1..19: mol_type = other RNA
aagacatattctttaactt

SEQ ID NO: 57 - RNA, 19 nt, synthetic construct
  source 1..19: mol_type = other RNA
aagtgcagattccctccac

SEQ ID NO: 58 - RNA, 19 nt, synthetic construct
  source 1..19: mol_type = other RNA
atccattgtcataggttat

SEQ ID NO: 59 - RNA, 19 nt, synthetic construct
  source 1..19: mol_type = other RNA
agacatctttgaacacctt

SEQ ID NO: 60 - RNA, 19 nt, synthetic construct
  source 1..19: mol_type = other RNA
ccattgtcataggttattg

SEQ ID NO: 61 - RNA, 19 nt, synthetic construct
  source 1..19: mol_type = other RNA
tgaagagaaatccattgtc

SEQ ID NO: 62 - RNA, 19 nt, synthetic construct
  source 1..19: mol_type = other RNA
gacatattctttaacttca

SEQ ID NO: 63 - RNA, 19 nt, synthetic construct
  source 1..19: mol_type = other RNA
cagtccttttacactcaaa

SEQ ID NO: 64 - RNA, 19 nt, synthetic construct
  source 1..19: mol_type = other RNA
aattttccttgaaagatcc

SEQ ID NO: 65 - RNA, 19 nt, synthetic construct
  source 1..19: mol_type = other RNA
tgaaattgtattttatctg

SEQ ID NO: 66 - RNA, 19 nt, synthetic construct
  source 1..19: mol_type = other RNA
agtaatttcaaaattctta

SEQ ID NO: 67 - RNA, 19 nt, synthetic construct
  source 1..19: mol_type = other RNA
caaaattcttaaagttctt

SEQ ID NO: 68 - RNA, 19 nt, synthetic construct
  source 1..19: mol_type = other RNA
tgaattttggttctgctct

SEQ ID NO: 69 - RNA, 19 nt, synthetic construct
  source 1..19: mol_type = other RNA
tgtcattttataattatgt

SEQ ID NO: 70 - RNA, 19 nt, synthetic construct
  source 1..19: mol_type = other RNA
ccaaatcctgtactgacaa

SEQ ID NO: 71 - RNA, 19 nt, synthetic construct
  source 1..19: mol_type = other RNA
ggataacttttaatagaga

SEQ ID NO: 72 - RNA, 19 nt, synthetic construct
  source 1..19: mol_type = other RNA
tttaagtcttctcttattc

SEQ ID NO: 73 - RNA, 19 nt, synthetic construct
  source 1..19: mol_type = other RNA
gataattccaatatgatca

SEQ ID NO: 74 - RNA, 19 nt, synthetic construct
  source 1..19: mol_type = other RNA
ggataaatgaacatggcct

SEQ ID NO: 75 - RNA, 19 nt, synthetic construct
  source 1..19: mol_type = other RNA
caaggttcatcattttctt

SEQ ID NO: 76 - RNA, 19 nt, synthetic construct
  source 1..19: mol_type = other RNA
tggaagtgctataaaacat

SEQ ID NO: 77 - RNA, 19 nt, synthetic construct
  source 1..19: mol_type = other RNA
ccaagtactcttaaagcaa

SEQ ID NO: 78 - RNA, 19 nt, synthetic construct
  source 1..19: mol_type = other RNA
tccaatgatttcctgtttc

SEQ ID NO: 79 - RNA, 19 nt, synthetic construct
  source 1..19: mol_type = other RNA
tatggtatattcatttcca

SEQ ID NO: 80 - RNA, 19 nt, synthetic construct
  source 1..19: mol_type = other RNA
gaacaagatgaacttccca

SEQ ID NO: 81 - RNA, 19 nt, synthetic construct
  source 1..19: mol_type = other RNA
tgaacttcaggaattttag

SEQ ID NO: 82 - RNA, 19 nt, synthetic construct
  source 1..19: mol_type = other RNA
aagtcttctcttattccaa

SEQ ID NO: 83 - RNA, 19 nt, synthetic construct
  source 1..19: mol_type = other RNA
gaatgtttatactttgata

SEQ ID NO: 84 - RNA, 19 nt, synthetic construct
  source 1..19: mol_type = other RNA
ccggaatcgtacacaaagg

SEQ ID NO: 85 - RNA, 19 nt, synthetic construct
  source 1..19: mol_type = other RNA
catacctctgctcttctga

SEQ ID NO: 86 - RNA, 19 nt, synthetic construct
  source 1..19: mol_type = other RNA
gatcaatttcttctaccat

SEQ ID NO: 87 - RNA, 19 nt, synthetic construct
  source 1..19: mol_type = other RNA
caacattgtgttttgcatt

SEQ ID NO: 88 - RNA, 19 nt, synthetic construct
  source 1..19: mol_type = other RNA
taactttataagcatatgc

SEQ ID NO: 89 - RNA, 19 nt, synthetic construct
  source 1..19: mol_type = other RNA
caggataacttttaataga

SEQ ID NO: 90 - RNA, 19 nt, synthetic construct
  source 1..19: mol_type = other RNA
ttttattggttgatactgt

SEQ ID NO: 91 - RNA, 19 nt, synthetic construct
  source 1..19: mol_type = other RNA
tgcaactgttttcttctgg

SEQ ID NO: 92 - RNA, 19 nt, synthetic construct
  source 1..19: mol_type = other RNA
tgctttgatacaacttcca

SEQ ID NO: 93 - RNA, 19 nt, synthetic construct
  source 1..19: mol_type = other RNA
ccaaagcttctctcttcaa

SEQ ID NO: 94 - RNA, 19 nt, synthetic construct
  source 1..19: mol_type = other RNA
gggaactcctttcgtctgc

SEQ ID NO: 95 - RNA, 19 nt, synthetic construct
  source 1..19: mol_type = other RNA
tatgacagttctttgactg

SEQ ID NO: 96 - RNA, 19 nt, synthetic construct
  source 1..19: mol_type = other RNA
ttgcagaataacatgtcca

SEQ ID NO: 97 - RNA, 19 nt, synthetic construct
  source 1..19: mol_type = other RNA
cagaagtcctatagttgta

SEQ ID NO: 98 - RNA, 19 nt, synthetic construct
  source 1..19: mol_type = other RNA
gataacttttaatagagat

SEQ ID NO: 99 - RNA, 19 nt, synthetic construct
  source 1..19: mol_type = other RNA
actaagatttcttttccaa

SEQ ID NO: 100 - RNA, 19 nt, synthetic construct
  source 1..19: mol_type = other RNA
gataaatgaacatggcctg

SEQ ID NO: 101 - RNA, 19 nt, synthetic construct
  source 1..19: mol_type = other RNA
gatgaacatgttgtgtctc

SEQ ID NO: 102 - RNA, 19 nt, synthetic construct
  source 1..19: mol_type = other RNA
tgatcatcttttaagtctt

SEQ ID NO: 103 - RNA, 19 nt, synthetic construct
  source 1..19: mol_type = other RNA
gagcaattccatttatcaa

SEQ ID NO: 104 - RNA, 19 nt, synthetic construct
  source 1..19: mol_type = other RNA
tgtgaattttccttgaaag

SEQ ID NO: 105 - RNA, 19 nt, synthetic construct
  source 1..19: mol_type = other RNA
tcaaaattcttaaagttct

SEQ ID NO: 106 - RNA, 19 nt, synthetic construct
  source 1..19: mol_type = other RNA
taaactccagcaccgtcac

SEQ ID NO: 107 - RNA, 19 nt, synthetic construct
  source 1..19: mol_type = other RNA
ttgatattggaagtgctat

SEQ ID NO: 108 - RNA, 19 nt, synthetic construct
  source 1..19: mol_type = other RNA
gtgcattcagtgttactgg

SEQ ID NO: 109 - RNA, 19 nt, synthetic construct
  source 1..19: mol_type = other RNA
aatgtttatactttgataa

SEQ ID NO: 110 - RNA, 19 nt, synthetic construct
  source 1..19: mol_type = other RNA
aaattgtattttatctgga

SEQ ID NO: 111 - RNA, 19 nt, synthetic construct
  source 1..19: mol_type = other RNA
taagtcttctcttattcca

SEQ ID NO: 112 - RNA, 19 nt, synthetic construct
  source 1..19: mol_type = other RNA
agaagtcctatagttgtaa

SEQ ID NO: 113 - RNA, 19 nt, synthetic construct
  source 1..19: mol_type = other RNA
cttgcttttatagtaattt

SEQ ID NO: 114 - RNA, 19 nt, synthetic construct
  source 1..19: mol_type = other RNA
tcaacattgtgttttgcat

SEQ ID NO: 115 - RNA, 19 nt, synthetic construct
  source 1..19: mol_type = other RNA
aggcagttgtttctaccat

SEQ ID NO: 116 - RNA, 19 nt, synthetic construct
  source 1..19: mol_type = other RNA
tatgatcaatttcttctac

SEQ ID NO: 117 - RNA, 19 nt, synthetic construct
  source 1..19: mol_type = other RNA
gtaatttcaaaattcttaa

SEQ ID NO: 118 - RNA, 19 nt, synthetic construct
  source 1..19: mol_type = other RNA
atcaacattgtgttttgca

SEQ ID NO: 119 - RNA, 19 nt, synthetic construct
  source 1..19: mol_type = other RNA
caaagtattcccaaaaggc

SEQ ID NO: 120 - RNA, 19 nt, synthetic construct
  source 1..19: mol_type = other RNA
aaaacatggtacactgttt

SEQ ID NO: 121 - RNA, 19 nt, synthetic construct
  source 1..19: mol_type = other RNA
acacagaactgcatcccag

SEQ ID NO: 122 - RNA, 19 nt, synthetic construct
  source 1..19: mol_type = other RNA
tccaagtactcttaaagca

SEQ ID NO: 123 - RNA, 19 nt, synthetic construct
  source 1..19: mol_type = other RNA
tgtagtatgacagttcttt

SEQ ID NO: 124 - RNA, 19 nt, synthetic construct
  source 1..19: mol_type = other RNA
cagaatagctttccctttt

SEQ ID NO: 125 - RNA, 19 nt, synthetic construct
  source 1..19: mol_type = other RNA
gcttttatagtaatttcaa

SEQ ID NO: 126 - RNA, 19 nt, synthetic construct
  source 1..19: mol_type = other RNA
gaagctactccatcatcaa

SEQ ID NO: 127 - RNA, 19 nt, synthetic construct
  source 1..19: mol_type = other RNA
tgccactaattctaagtaa

SEQ ID NO: 128 - RNA, 19 nt, synthetic construct
  source 1..19: mol_type = other RNA
gtagactctatgactgtta

SEQ ID NO: 129 - RNA, 19 nt, synthetic construct
  source 1..19: mol_type = other RNA
ctaagatttcttttccaaa

SEQ ID NO: 130 - RNA, 19 nt, synthetic construct
  source 1..19: mol_type = other RNA
caatatttaaccagactga

SEQ ID NO: 131 - RNA, 19 nt, synthetic construct
  source 1..19: mol_type = other RNA
tagtaatttcaaaattctt

SEQ ID NO: 132 - RNA, 19 nt, synthetic construct
  source 1..19: mol_type = other RNA
ggaaaagagataattccaa

SEQ ID NO: 133 - RNA, 19 nt, synthetic construct
  source 1..19: mol_type = other RNA
aaaatgcttgacacgatga

SEQ ID NO: 134 - RNA, 19 nt, synthetic construct
  source 1..19: mol_type = other RNA
tatattcatttccaggaag

SEQ ID NO: 135 - RNA, 19 nt, synthetic construct
  source 1..19: mol_type = other RNA
taataaaagcaagtgccac

SEQ ID NO: 136 - RNA, 19 nt, synthetic construct
  source 1..19: mol_type = other RNA
tactatgcgtttgtaatca

SEQ ID NO: 137 - RNA, 19 nt, synthetic construct
  source 1..19: mol_type = other RNA
gaattgaaatactctttcc

SEQ ID NO: 138 - RNA, 19 nt, synthetic construct
  source 1..19: mol_type = other RNA
tcaggataacttttaatag

SEQ ID NO: 139 - RNA, 19 nt, synthetic construct
  source 1..19: mol_type = other RNA
tacaacttccaaatacaca

SEQ ID NO: 140 - RNA, 19 nt, synthetic construct
  source 1..19: mol_type = other RNA
aatcattctctaataaaag

SEQ ID NO: 141 - RNA, 19 nt, synthetic construct
  source 1..19: mol_type = other RNA
gaatagctttcccttttga

SEQ ID NO: 142 - RNA, 19 nt, synthetic construct
  source 1..19: mol_type = other RNA
ggaaattcttgtctgtcat

SEQ ID NO: 143 - RNA, 19 nt, synthetic construct
  source 1..19: mol_type = other RNA
ttgaattttggttctgctc

SEQ ID NO: 144 - RNA, 19 nt, synthetic construct
  source 1..19: mol_type = other RNA
agtgagctttacaaataag

SEQ ID NO: 145 - RNA, 19 nt, synthetic construct
  source 1..19: mol_type = other RNA
aaacatggtacactgttta

SEQ ID NO: 146 - RNA, 19 nt, synthetic construct
  source 1..19: mol_type = other RNA
tagactctatgactgttac

SEQ ID NO: 147 - RNA, 19 nt, synthetic construct
  source 1..19: mol_type = other RNA
ttttcttgggagtcatctg

SEQ ID NO: 148 - RNA, 19 nt, synthetic construct
  source 1..19: mol_type = other RNA
gtaggcaaggagatgtcca

SEQ ID NO: 149 - RNA, 19 nt, synthetic construct
  source 1..19: mol_type = other RNA
aaagccacctccatacctc

SEQ ID NO: 150 - RNA, 19 nt, synthetic construct
  source 1..19: mol_type = other RNA
taagatttcttttccaaac

SEQ ID NO: 151 - RNA, 19 nt, synthetic construct
  source 1..19: mol_type = other RNA
aaagctgcaaacttcctca

SEQ ID NO: 152 - RNA, 19 nt, synthetic construct
  source 1..19: mol_type = other RNA
tctaataaaagcaagtgcc

SEQ ID NO: 153 - RNA, 19 nt, synthetic construct
  source 1..19: mol_type = other RNA
caattgtttgtgcattcag

SEQ ID NO: 154 - RNA, 19 nt, synthetic construct
  source 1..19: mol_type = other RNA
accaaagcttctctcttca

SEQ ID NO: 155 - RNA, 19 nt, synthetic construct
  source 1..19: mol_type = other RNA
gcaactgttttcttctggg

SEQ ID NO: 156 - RNA, 19 nt, synthetic construct
  source 1..19: mol_type = other RNA
atgctttgatacaacttcc

SEQ ID NO: 157 - RNA, 19 nt, synthetic construct
  source 1..19: mol_type = other RNA
aattcatctaaattagcta

SEQ ID NO: 158 - RNA, 19 nt, synthetic construct
  source 1..19: mol_type = other RNA
tgtgacgatgtaatagacc

SEQ ID NO: 159 - RNA, 19 nt, synthetic construct
  source 1..19: mol_type = other RNA
ggtacactgtttatctggt

SEQ ID NO: 160 - RNA, 19 nt, synthetic construct
  source 1..19: mol_type = other RNA
ggttgccttgtacttgaca

SEQ ID NO: 161 - RNA, 19 nt, synthetic construct
  source 1..19: mol_type = other RNA
ccaaggaaattcttgtctg

SEQ ID NO: 162 - RNA, 19 nt, synthetic construct
  source 1..19: mol_type = other RNA
ttaaccagactgaatcaga

SEQ ID NO: 163 - RNA, 19 nt, synthetic construct
  source 1..19: mol_type = other RNA
tagcagctatttcttctat

SEQ ID NO: 164 - RNA, 19 nt, synthetic construct
  source 1..19: mol_type = other RNA
ccagttttgtagatatcca

SEQ ID NO: 165 - RNA, 19 nt, synthetic construct
  source 1..19: mol_type = other RNA
aatgatttcctgtttccag

SEQ ID NO: 166 - RNA, 19 nt, synthetic construct
  source 1..19: mol_type = other RNA
agacaagatctcacctaca

SEQ ID NO: 167 - RNA, 19 nt, synthetic construct
  source 1..19: mol_type = other RNA
gtggattacctttaaccaa

SEQ ID NO: 168 - RNA, 19 nt, synthetic construct
  source 1..19: mol_type = other RNA
tgatactgtgaattttcct

SEQ ID NO: 169 - RNA, 19 nt, synthetic construct
  source 1..19: mol_type = other RNA
aatactgggacaacgctca

SEQ ID NO: 170 - RNA, 19 nt, synthetic construct
  source 1..19: mol_type = other RNA
cataattaagtactgtctt

SEQ ID NO: 171 - RNA, 19 nt, synthetic construct
  source 1..19: mol_type = other RNA
caaacttcctcagaggtac

SEQ ID NO: 172 - RNA, 19 nt, synthetic construct
  source 1..19: mol_type = other RNA
aaggccatgttatttcaga

SEQ ID NO: 173 - RNA, 19 nt, synthetic construct
  source 1..19: mol_type = other RNA
tgcaaactgtatgcagctg

SEQ ID NO: 174 - RNA, 19 nt, synthetic construct
  source 1..19: mol_type = other RNA
agaatagctttcccttttg

SEQ ID NO: 175 - RNA, 19 nt, synthetic construct
  source 1..19: mol_type = other RNA
tactgtgaattttccttga

SEQ ID NO: 176 - RNA, 19 nt, synthetic construct
  source 1..19: mol_type = other RNA
ccaacttcaaagagttcaa

SEQ ID NO: 177 - RNA, 19 nt, synthetic construct
  source 1..19: mol_type = other RNA
ctgaattttgatattggaa

SEQ ID NO: 178 - RNA, 19 nt, synthetic construct
  source 1..19: mol_type = other RNA
aaaggctgtaagatataag

SEQ ID NO: 179 - RNA, 19 nt, synthetic construct
  source 1..19: mol_type = other RNA
ttgcttttatagtaatttc

SEQ ID NO: 180 - RNA, 19 nt, synthetic construct
  source 1..19: mol_type = other RNA
gtccaagtactcttaaagc

SEQ ID NO: 181 - RNA, 19 nt, synthetic construct
  source 1..19: mol_type = other RNA
acactaattctgctgtctg

SEQ ID NO: 182 - RNA, 19 nt, synthetic construct
  source 1..19: mol_type = other RNA
ctggcttgcttactggtaa

SEQ ID NO: 183 - RNA, 19 nt, synthetic construct
  source 1..19: mol_type = other RNA
gttgccttgtacttgacaa

SEQ ID NO: 184 - RNA, 19 nt, synthetic construct
  source 1..19: mol_type = other RNA
cagcatttctgtaggacat

SEQ ID NO: 185 - RNA, 19 nt, synthetic construct
  source 1..19: mol_type = other RNA
ttatactttgataagatgc

SEQ ID NO: 186 - RNA, 19 nt, synthetic construct
  source 1..19: mol_type = other RNA
ttaagtactgtcttccttt

SEQ ID NO: 187 - RNA, 19 nt, synthetic construct
  source 1..19: mol_type = other RNA
ctgcaaacttcctcagagg

SEQ ID NO: 188 - RNA, 19 nt, synthetic construct
  source 1..19: mol_type = other RNA
aagacagtttctcttttgg

SEQ ID NO: 189 - RNA, 19 nt, synthetic construct
  source 1..19: mol_type = other RNA
attcagtttgtagggagag

SEQ ID NO: 190 - RNA, 19 nt, synthetic construct
  source 1..19: mol_type = other RNA
tggaatgtttatactttga

SEQ ID NO: 191 - RNA, 19 nt, synthetic construct
  source 1..19: mol_type = other RNA
taacagggtcttcatgtgt

SEQ ID NO: 192 - RNA, 19 nt, synthetic construct
  source 1..19: mol_type = other RNA
agagattgttgcatcaaat

SEQ ID NO: 193 - RNA, 19 nt, synthetic construct
  source 1..19: mol_type = other RNA
gagtcatctgcatttgcat

SEQ ID NO: 194 - RNA, 19 nt, synthetic construct
  source 1..19: mol_type = other RNA
gaatgtttatatttagcag

SEQ ID NO: 195 - RNA, 19 nt, synthetic construct
  source 1..19: mol_type = other RNA
ggaacaagatgaacttccc

SEQ ID NO: 196 - RNA, 19 nt, synthetic construct
  source 1..19: mol_type = other RNA
ggtatttctgcctcttcag

SEQ ID NO: 197 - RNA, 19 nt, synthetic construct
  source 1..19: mol_type = other RNA
cagaactgcatcccagaag

SEQ ID NO: 198 - RNA, 19 nt, synthetic construct
  source 1..19: mol_type = other RNA
ttccggtgtccaataacct

SEQ ID NO: 199 - RNA, 19 nt, synthetic construct
  source 1..19: mol_type = other RNA
catcaattgtttgtgcatt

SEQ ID NO: 200 - RNA, 19 nt, synthetic construct
  source 1..19: mol_type = other RNA
aatactctttccaagggct

SEQ ID NO: 201 - RNA, 19 nt, synthetic construct
  source 1..19: mol_type = other RNA
tcaaatgcttcagtgtatc

SEQ ID NO: 202 - RNA, 19 nt, synthetic construct
  source 1..19: mol_type = other RNA
aagcaagtgccactaattc

SEQ ID NO: 203 - RNA, 19 nt, synthetic construct
  source 1..19: mol_type = other RNA
ttaatagagattgttgcat

SEQ ID NO: 204 - RNA, 19 nt, synthetic construct
  source 1..19: mol_type = other RNA
atagagattgttgcatcaa

SEQ ID NO: 205 - RNA, 19 nt, synthetic construct
  source 1..19: mol_type = other RNA
gaactcctttcgtctgcta

SEQ ID NO: 206 - RNA, 19 nt, synthetic construct
  source 1..19: mol_type = other RNA
gtcattttataattatgta

SEQ ID NO: 207 - RNA, 19 nt, synthetic construct
  source 1..19: mol_type = other RNA
aagaattgaaatactcttt

SEQ ID NO: 208 - RNA, 19 nt, synthetic construct
  source 1..19: mol_type = other RNA
aaagcctttctaattccaa

SEQ ID NO: 209 - RNA, 19 nt, synthetic construct
  source 1..19: mol_type = other RNA
tcaatatttaaccagactg

SEQ ID NO: 210 - RNA, 19 nt, synthetic construct
  source 1..19: mol_type = other RNA
tggtatattcatttccagg

SEQ ID NO: 211 - RNA, 19 nt, synthetic construct
  source 1..19: mol_type = other RNA
tgaaacaattgaacgaaac

SEQ ID NO: 212 - RNA, 19 nt, synthetic construct
  source 1..19: mol_type = other RNA
aatatcttgcttttatagt

SEQ ID NO: 213 - RNA, 19 nt, synthetic construct
  source 1..19: mol_type = other RNA
agagattgtcagatccaat

SEQ ID NO: 214 - RNA, 19 nt, synthetic construct
  source 1..19: mol_type = other RNA
agcaattccatttatcaac

SEQ ID NO: 215 - RNA, 19 nt, synthetic construct
  source 1..19: mol_type = other RNA
ttatcaggataacttttaa

SEQ ID NO: 216 - RNA, 19 nt, synthetic construct
  source 1..19: mol_type = other RNA
cgaatttctggcttgctta

SEQ ID NO: 217 - RNA, 19 nt, synthetic construct
  source 1..19: mol_type = other RNA
tcaagttcagactggtgag

SEQ ID NO: 218 - RNA, 19 nt, synthetic construct
  source 1..19: mol_type = other RNA
agaggtactggttttgtga

SEQ ID NO: 219 - RNA, 19 nt, synthetic construct
  source 1..19: mol_type = other RNA
ggtattttctttcaagcaa

SEQ ID NO: 220 - RNA, 19 nt, synthetic construct
  source 1..19: mol_type = other RNA
aggtactggttttgtgaac

SEQ ID NO: 221 - RNA, 19 nt, synthetic construct
  source 1..19: mol_type = other RNA
cagattccctccacagcag

SEQ ID NO: 222 - RNA, 19 nt, synthetic construct
  source 1..19: mol_type = other RNA
tagtcagcatttctgtagg

SEQ ID NO: 223 - RNA, 19 nt, synthetic construct
  source 1..19: mol_type = other RNA
attagcacggagctggctt

SEQ ID NO: 224 - RNA, 19 nt, synthetic construct
  source 1..19: mol_type = other RNA
taagagacacagtttggcc

SEQ ID NO: 225 - RNA, 19 nt, synthetic construct
  source 1..19: mol_type = other RNA
gaacatgttgtgtctctag

SEQ ID NO: 226 - RNA, 19 nt, synthetic construct
  source 1..19: mol_type = other RNA
cataagtgcaaactgtatg

SEQ ID NO: 227 - RNA, 19 nt, synthetic construct
  source 1..19: mol_type = other RNA
caaattcagtttgtaggga

SEQ ID NO: 228 - RNA, 19 nt, synthetic construct
  source 1..19: mol_type = other RNA
acaagcagtccttttacac

SEQ ID NO: 229 - RNA, 19 nt, synthetic construct
  source 1..19: mol_type = other RNA
aagtattcccaaaaggccc

SEQ ID NO: 230 - RNA, 19 nt, synthetic construct
  source 1..19: mol_type = other RNA
caatcacagtaaaggctgt

SEQ ID NO: 231 - RNA, 19 nt, synthetic construct
  source 1..19: mol_type = other RNA
aatagctttcccttttgac

SEQ ID NO: 232 - RNA, 19 nt, synthetic construct
  source 1..19: mol_type = other RNA
tattggttgatactgtgaa

SEQ ID NO: 233 - RNA, 19 nt, synthetic construct
  source 1..19: mol_type = other RNA
cagaaatggccaatgtaaa

SEQ ID NO: 234 - RNA, 19 nt, synthetic construct
  source 1..19: mol_type = other RNA
ttgtaatcagagtttccgt

SEQ ID NO: 235 - RNA, 19 nt, synthetic construct
  source 1..19: mol_type = other RNA
actcaggctttaatgatca

SEQ ID NO: 236 - RNA, 19 nt, synthetic construct
  source 1..19: mol_type = other RNA
cagctatttcttctatctt

SEQ ID NO: 237 - RNA, 19 nt, synthetic construct
  source 1..19: mol_type = other RNA
atatcttgcttttatagta

SEQ ID NO: 238 - RNA, 19 nt, synthetic construct
  source 1..19: mol_type = other RNA
acaaggttcatcattttct

SEQ ID NO: 239 - RNA, 19 nt, synthetic construct
  source 1..19: mol_type = other RNA
attgtgttttgcattgctg

SEQ ID NO: 240 - RNA, 19 nt, synthetic construct
  source 1..19: mol_type = other RNA
gccacaataaagaattaca

SEQ ID NO: 241 - RNA, 19 nt, synthetic construct
  source 1..19: mol_type = other RNA
ggtggattacctttaacca

SEQ ID NO: 242 - RNA, 19 nt, synthetic construct
  source 1..19: mol_type = other RNA
cttctctcttcaaagctga

SEQ ID NO: 243 - RNA, 19 nt, synthetic construct
  source 1..19: mol_type = other RNA
tgggatgcttcaatatcct

SEQ ID NO: 244 - RNA, 19 nt, synthetic construct
  source 1..19: mol_type = other RNA
aaatcttctaaactgtagt

SEQ ID NO: 245 - RNA, 19 nt, synthetic construct
  source 1..19: mol_type = other RNA
aaattcagtttgtagggag

SEQ ID NO: 246 - RNA, 19 nt, synthetic construct
  source 1..19: mol_type = other RNA
ctgtcattttataattatg

SEQ ID NO: 247 - RNA, 19 nt, synthetic construct
  source 1..19: mol_type = other RNA
aatgctttgatacaacttc

SEQ ID NO: 248 - RNA, 19 nt, synthetic construct
  source 1..19: mol_type = other RNA
tcctctttatatttagcct

SEQ ID NO: 249 - RNA, 19 nt, synthetic construct
  source 1..19: mol_type = other RNA
gcaaattcatctaaattag

SEQ ID NO: 250 - RNA, 19 nt, synthetic construct
  source 1..19: mol_type = other RNA
ttccaaatacacataagaa

SEQ ID NO: 251 - RNA, 14 nt, synthetic construct
  source 1..14: mol_type = other RNA
aggccaaactgtgt

SEQ ID NO: 252 - RNA, 14 nt, synthetic construct
  source 1..14: mol_type = other RNA
gacttcaagattcc

SEQ ID NO: 253 - RNA, 14 nt, synthetic construct
  source 1..14: mol_type = other RNA
agctacaagcccag

SEQ ID NO: 254 - RNA, 14 nt, synthetic construct
  source 1..14: mol_type = other RNA
ctataattacttga

SEQ ID NO: 255 - RNA, 14 nt, synthetic construct
  source 1..14: mol_type = other RNA
agacaaacctgttt

SEQ ID NO: 256 - RNA, 14 nt, synthetic construct
  source 1..14: mol_type = other RNA
gttaaaatgtctgc

SEQ ID NO: 257 - RNA, 14 nt, synthetic construct
  source 1..14: mol_type = other RNA
aaccagctccaggt

SEQ ID NO: 258 - RNA, 14 nt, synthetic construct
  source 1..14: mol_type = other RNA
tacttgattttatc

SEQ ID NO: 259 - RNA, 14 nt, synthetic construct
  source 1..14: mol_type = other RNA
ggccaaactgtgtc

SEQ ID NO: 260 - RNA, 14 nt, synthetic construct
  source 1..14: mol_type = other RNA
acttcaagattccg

SEQ ID NO: 261 - RNA, 14 nt, synthetic construct
  source 1..14: mol_type = other RNA
gtgttaaaatgtct

SEQ ID NO: 262 - RNA, 14 nt, synthetic construct
  source 1..14: mol_type = other RNA
ttttcctgacttca

SEQ ID NO: 263 - RNA, 14 nt, synthetic construct
  source 1..14: mol_type = other RNA
caggccaaactgtg

SEQ ID NO: 264 - RNA, 14 nt, synthetic construct
  source 1..14: mol_type = other RNA
aactcactataatt

SEQ ID NO: 265 - RNA, 14 nt, synthetic construct
  source 1..14: mol_type = other RNA
acatctgacttgga

SEQ ID NO: 266 - RNA, 14 nt, synthetic construct
  source 1..14: mol_type = other RNA
atctcttttcctga

SEQ ID NO: 267 - RNA, 14 nt, synthetic construct
  source 1..14: mol_type = other RNA
gaatatgtcttgcc

SEQ ID NO: 268 - RNA, 14 nt, synthetic construct
  source 1..14: mol_type = other RNA
ggaaattggccttc

SEQ ID NO: 269 - RNA, 14 nt, synthetic construct
  source 1..14: mol_type = other RNA
actataattacttg

SEQ ID NO: 270 - RNA, 14 nt, synthetic construct
  source 1..14: mol_type = other RNA
ttacttgattttat

SEQ ID NO: 271 - RNA, 14 nt, synthetic construct
  source 1..14: mol_type = other RNA
tataattacttgat

SEQ ID NO: 272 - RNA, 14 nt, synthetic construct
  source 1..14: mol_type = other RNA
ctctggaaattggc

SEQ ID NO: 273 - RNA, 14 nt, synthetic construct
  source 1..14: mol_type = other RNA
tcactataattact

SEQ ID NO: 274 - RNA, 14 nt, synthetic construct
  source 1..14: mol_type = other RNA
aacaagtaccttta

SEQ ID NO: 275 - RNA, 14 nt, synthetic construct
  source 1..14: mol_type = other RNA
ctgaaacagcagtc

SEQ ID NO: 276 - RNA, 14 nt, synthetic construct
  source 1..14: mol_type = other RNA
tctgaaacagcagt

SEQ ID NO: 277 - RNA, 14 nt, synthetic construct
  source 1..14: mol_type = other RNA
aagtacctttatat

SEQ ID NO: 278 - RNA, 14 nt, synthetic construct
  source 1..14: mol_type = other RNA
aggaactgtttaca

SEQ ID NO: 279 - RNA, 14 nt, synthetic construct
  source 1..14: mol_type = other RNA
cagccaaagttacc

SEQ ID NO: 280 - RNA, 14 nt, synthetic construct
  source 1..14: mol_type = other RNA
tgtttacaactata

SEQ ID NO: 281 - RNA, 14 nt, synthetic construct
  source 1..14: mol_type = other RNA
gttaaagaatatgt

SEQ ID NO: 282 - RNA, 14 nt, synthetic construct
  source 1..14: mol_type = other RNA
taaaaggactgctt

SEQ ID NO: 283 - RNA, 14 nt, synthetic construct
  source 1..14: mol_type = other RNA
aaaataactcacta

SEQ ID NO: 284 - RNA, 14 nt, synthetic construct
  source 1..14: mol_type = other RNA
aaagatgtcttcct

SEQ ID NO: 285 - RNA, 14 nt, synthetic construct
  source 1..14: mol_type = other RNA
tgtaaaaggactgc

SEQ ID NO: 286 - RNA, 14 nt, synthetic construct
  source 1..14: mol_type = other RNA
ttgacaaaataact

SEQ ID NO: 287 - RNA, 14 nt, synthetic construct
  source 1..14: mol_type = other RNA
atattctgttgtac

SEQ ID NO: 288 - RNA, 14 nt, synthetic construct
  source 1..14: mol_type = other RNA
attgacaaaataac

SEQ ID NO: 289 - RNA, 14 nt, synthetic construct
  source 1..14: mol_type = other RNA
tttcctgaagcctg

SEQ ID NO: 290 - RNA, 14 nt, synthetic construct
  source 1..14: mol_type = other RNA
ttatctcttttcct

SEQ ID NO: 291 - RNA, 14 nt, synthetic construct
  source 1..14: mol_type = other RNA
atattgctgtaaca

SEQ ID NO: 292 - RNA, 14 nt, synthetic construct
  source 1..14: mol_type = other RNA
tgcatatgcttata

SEQ ID NO: 293 - RNA, 14 nt, synthetic construct
  source 1..14: mol_type = other RNA
agttaaagaatatg

SEQ ID NO: 294 - RNA, 14 nt, synthetic construct
  source 1..14: mol_type = other RNA
ttcaaagatgtctt

SEQ ID NO: 295 - RNA, 14 nt, synthetic construct
  source 1..14: mol_type = other RNA
agatgtcttcctgg

SEQ ID NO: 296 - RNA, 14 nt, synthetic construct
  source 1..14: mol_type = other RNA
tttatattgctgta

SEQ ID NO: 297 - RNA, 14 nt, synthetic construct
  source 1..14: mol_type = other RNA
aacctatgacaatg

SEQ ID NO: 298 - RNA, 14 nt, synthetic construct
  source 1..14: mol_type = other RNA
gacaaaataactca

SEQ ID NO: 299 - RNA, 14 nt, synthetic construct
  source 1..14: mol_type = other RNA
caaaataactcact

SEQ ID NO: 300 - RNA, 14 nt, synthetic construct
  source 1..14: mol_type = other RNA
acaaaataactcac

SEQ ID NO: 301 - RNA, 14 nt, synthetic construct
  source 1..14: mol_type = other RNA
ttcaaggaaaattc

SEQ ID NO: 302 - RNA, 14 nt, synthetic construct
  source 1..14: mol_type = other RNA
attgctgtaacagt

SEQ ID NO: 303 - RNA, 14 nt, synthetic construct
  source 1..14: mol_type = other RNA
atgacaatggattt

SEQ ID NO: 304 - RNA, 14 nt, synthetic construct
  source 1..14: mol_type = other RNA
tatgacaatggatt

SEQ ID NO: 305 - RNA, 14 nt, synthetic construct
  source 1..14: mol_type = other RNA
acaatggatttctc

SEQ ID NO: 306 - RNA, 14 nt, synthetic construct
  source 1..14: mol_type = other RNA
aaagaatatgtctt

SEQ ID NO: 307 - RNA, 14 nt, synthetic construct
  source 1..14: mol_type = other RNA
gggaatctgcactt

SEQ ID NO: 308 - RNA, 14 nt, synthetic construct
  source 1..14: mol_type = other RNA
ctatgacaatggat

SEQ ID NO: 309 - RNA, 14 nt, synthetic construct
  source 1..14: mol_type = other RNA
gttcaaagatgtct

SEQ ID NO: 310 - RNA, 14 nt, synthetic construct
  source 1..14: mol_type = other RNA
acctatgacaatgg

SEQ ID NO: 311 - RNA, 14 nt, synthetic construct
  source 1..14: mol_type = other RNA
tggatttctcttca

SEQ ID NO: 312 - RNA, 14 nt, synthetic construct
  source 1..14: mol_type = other RNA
ttaaagaatatgtc

SEQ ID NO: 313 - RNA, 14 nt, synthetic construct
  source 1..14: mol_type = other RNA
gtgtaaaaggactg

SEQ ID NO: 314 - RNA, 14 nt, synthetic construct
  source 1..14: mol_type = other RNA
tttcaaggaaaatt

SEQ ID NO: 315 - RNA, 14 nt, synthetic construct
  source 1..14: mol_type = other RNA
aaaatacaatttca

SEQ ID NO: 316 - RNA, 14 nt, synthetic construct
  source 1..14: mol_type = other RNA
attttgaaattact

SEQ ID NO: 317 - RNA, 14 nt, synthetic construct
  source 1..14: mol_type = other RNA
ctttaagaattttg

SEQ ID NO: 318 - RNA, 14 nt, synthetic construct
  source 1..14: mol_type = other RNA
agaaccaaaattca

SEQ ID NO: 319 - RNA, 14 nt, synthetic construct
  source 1..14: mol_type = other RNA
attataaaatgaca

SEQ ID NO: 320 - RNA, 14 nt, synthetic construct
  source 1..14: mol_type = other RNA
agtacaggatttgg

SEQ ID NO: 321 - RNA, 14 nt, synthetic construct
  source 1..14: mol_type = other RNA
attaaaagttatcc

SEQ ID NO: 322 - RNA, 14 nt, synthetic construct
  source 1..14: mol_type = other RNA
agagaagacttaaa

SEQ ID NO: 323 - RNA, 14 nt, synthetic construct
  source 1..14: mol_type = other RNA
atattggaattatc

SEQ ID NO: 324 - RNA, 14 nt, synthetic construct
  source 1..14: mol_type = other RNA
atgttcatttatcc

SEQ ID NO: 325 - RNA, 14 nt, synthetic construct
  source 1..14: mol_type = other RNA
aatgatgaaccttg

SEQ ID NO: 326 - RNA, 14 nt, synthetic construct
  source 1..14: mol_type = other RNA
ttatagcacttcca

SEQ ID NO: 327 - RNA, 14 nt, synthetic construct
  source 1..14: mol_type = other RNA
ttaagagtacttgg

SEQ ID NO: 328 - RNA, 14 nt, synthetic construct
  source 1..14: mol_type = other RNA
aggaaatcattgga

SEQ ID NO: 329 - RNA, 14 nt, synthetic construct
  source 1..14: mol_type = other RNA
atgaatataccata

SEQ ID NO: 330 - RNA, 14 nt, synthetic construct
  source 1..14: mol_type = other RNA
agttcatcttgttc

SEQ ID NO: 331 - RNA, 14 nt, synthetic construct
  source 1..14: mol_type = other RNA
attcctgaagttca

SEQ ID NO: 332 - RNA, 14 nt, synthetic construct
  source 1..14: mol_type = other RNA
ataagagaagactt

SEQ ID NO: 333 - RNA, 14 nt, synthetic construct
  source 1..14: mol_type = other RNA
aagtataaacattc

SEQ ID NO: 334 - RNA, 14 nt, synthetic construct
  source 1..14: mol_type = other RNA
gtgtacgattccgg

SEQ ID NO: 335 - RNA, 14 nt, synthetic construct
  source 1..14: mol_type = other RNA
agagcagaggtatg

SEQ ID NO: 336 - RNA, 14 nt, synthetic construct
  source 1..14: mol_type = other RNA
agaagaaattgatc

SEQ ID NO: 337 - RNA, 14 nt, synthetic construct
  source 1..14: mol_type = other RNA
aaaacacaatgttg

SEQ ID NO: 338 - RNA, 14 nt, synthetic construct
  source 1..14: mol_type = other RNA
tgcttataaagtta

SEQ ID NO: 339 - RNA, 14 nt, synthetic construct
  source 1..14: mol_type = other RNA
taaaagttatcctg

SEQ ID NO: 340 - RNA, 14 nt, synthetic construct
  source 1..14: mol_type = other RNA
atcaaccaataaaa

SEQ ID NO: 341 - RNA, 14 nt, synthetic construct
  source 1..14: mol_type = other RNA
agaaaacagttgca

SEQ ID NO: 342 - RNA, 14 nt, synthetic construct
  source 1..14: mol_type = other RNA
gttgtatcaaagca

SEQ ID NO: 343 - RNA, 14 nt, synthetic construct
  source 1..14: mol_type = other RNA
gagagaagctttgg

SEQ ID NO: 344 - RNA, 14 nt, synthetic construct
  source 1..14: mol_type = other RNA
cgaaaggagttccc

SEQ ID NO: 345 - RNA, 14 nt, synthetic construct
  source 1..14: mol_type = other RNA
aaagaactgtcata

SEQ ID NO: 346 - RNA, 14 nt, synthetic construct
  source 1..14: mol_type = other RNA
atgttattctgcaa

SEQ ID NO: 347 - RNA, 14 nt, synthetic construct
  source 1..14: mol_type = other RNA
ctataggacttctg

SEQ ID NO: 348 - RNA, 14 nt, synthetic construct
  source 1..14: mol_type = other RNA
tattaaaagttatc

SEQ ID NO: 349 - RNA, 14 nt, synthetic construct
  source 1..14: mol_type = other RNA
aaagaaatcttagt

SEQ ID NO: 350 - RNA, 14 nt, synthetic construct
  source 1..14: mol_type = other RNA
catgttcatttatc

SEQ ID NO: 351 - RNA, 14 nt, synthetic construct
  source 1..14: mol_type = other RNA
acaacatgttcatc

SEQ ID NO: 352 - RNA, 14 nt, synthetic construct
  source 1..14: mol_type = other RNA
ttaaaagatgatca

SEQ ID NO: 353 - RNA, 14 nt, synthetic construct
  source 1..14: mol_type = other RNA
aaatggaattgctc

SEQ ID NO: 354 - RNA, 14 nt, synthetic construct
  source 1..14: mol_type = other RNA
aaggaaaattcaca

SEQ ID NO: 355 - RNA, 14 nt, synthetic construct
  source 1..14: mol_type = other RNA
tttaagaattttga

SEQ ID NO: 356 - RNA, 14 nt, synthetic construct
  source 1..14: mol_type = other RNA
ggtgctggagttta

SEQ ID NO: 357 - RNA, 14 nt, synthetic construct
  source 1..14: mol_type = other RNA
acttccaatatcaa

SEQ ID NO: 358 - RNA, 14 nt, synthetic construct
  source 1..14: mol_type = other RNA
aacactgaatgcac

SEQ ID NO: 359 - RNA, 14 nt, synthetic construct
  source 1..14: mol_type = other RNA
aaagtataaacatt

SEQ ID NO: 360 - RNA, 14 nt, synthetic construct
  source 1..14: mol_type = other RNA
ataaaatacaattt

SEQ ID NO: 361 - RNA, 14 nt, synthetic construct
  source 1..14: mol_type = other RNA
taagagaagactta

SEQ ID NO: 362 - RNA, 14 nt, synthetic construct
  source 1..14: mol_type = other RNA
actataggacttct

SEQ ID NO: 363 - RNA, 14 nt, synthetic construct
  source 1..14: mol_type = other RNA
actataaaagcaag

SEQ ID NO: 364 - RNA, 14 nt, synthetic construct
  source 1..14: mol_type = other RNA
aaacacaatgttga

SEQ ID NO: 365 - RNA, 14 nt, synthetic construct
  source 1..14: mol_type = other RNA
agaaacaactgcct

SEQ ID NO: 366 - RNA, 14 nt, synthetic construct
  source 1..14: mol_type = other RNA
agaaattgatcata

SEQ ID NO: 367 - RNA, 14 nt, synthetic construct
  source 1..14: mol_type = other RNA
aattttgaaattac

SEQ ID NO: 368 - RNA, 14 nt, synthetic construct
  source 1..14: mol_type = other RNA
aacacaatgttgat

SEQ ID NO: 369 - RNA, 14 nt, synthetic construct
  source 1..14: mol_type = other RNA
ttgggaatactttg

SEQ ID NO: 370 - RNA, 14 nt, synthetic construct
  source 1..14: mol_type = other RNA
gtgtaccatgtttt

SEQ ID NO: 371 - RNA, 14 nt, synthetic construct
  source 1..14: mol_type = other RNA
atgcagttctgtgt

SEQ ID NO: 372 - RNA, 14 nt, synthetic construct
  source 1..14: mol_type = other RNA
taagagtacttgga

SEQ ID NO: 373 - RNA, 14 nt, synthetic construct
  source 1..14: mol_type = other RNA
actgtcatactaca

SEQ ID NO: 374 - RNA, 14 nt, synthetic construct
  source 1..14: mol_type = other RNA
ggaaagctattctg

SEQ ID NO: 375 - RNA, 14 nt, synthetic construct
  source 1..14: mol_type = other RNA
attactataaaagc

SEQ ID NO: 376 - RNA, 14 nt, synthetic construct
  source 1..14: mol_type = other RNA
gatggagtagcttc

SEQ ID NO: 377 - RNA, 14 nt, synthetic construct
  source 1..14: mol_type = other RNA
tagaattagtggca

SEQ ID NO: 378 - RNA, 14 nt, synthetic construct
  source 1..14: mol_type = other RNA
gtcatagagtctac

SEQ ID NO: 379 - RNA, 14 nt, synthetic construct
  source 1..14: mol_type = other RNA
aaaagaaatcttag

SEQ ID NO: 380 - RNA, 14 nt, synthetic construct
  source 1..14: mol_type = other RNA
ctggttaaatattg

SEQ ID NO: 381 - RNA, 14 nt, synthetic construct
  source 1..14: mol_type = other RNA
ttttgaaattacta

SEQ ID NO: 382 - RNA, 14 nt, synthetic construct
  source 1..14: mol_type = other RNA
attatctcttttcc

SEQ ID NO: 383 - RNA, 14 nt, synthetic construct
  source 1..14: mol_type = other RNA
gtgtcaagcatttt

SEQ ID NO: 384 - RNA, 14 nt, synthetic construct
  source 1..14: mol_type = other RNA
tggaaatgaatata

SEQ ID NO: 385 - RNA, 14 nt, synthetic construct
  source 1..14: mol_type = other RNA
acttgcttttatta

SEQ ID NO: 386 - RNA, 14 nt, synthetic construct
  source 1..14: mol_type = other RNA
acaaacgcatagta

SEQ ID NO: 387 - RNA, 14 nt, synthetic construct
  source 1..14: mol_type = other RNA
gagtatttcaattc

SEQ ID NO: 388 - RNA, 14 nt, synthetic construct
  source 1..14: mol_type = other RNA
aaaagttatcctga

SEQ ID NO: 389 - RNA, 14 nt, synthetic construct
  source 1..14: mol_type = other RNA
atttggaagttgta

SEQ ID NO: 390 - RNA, 14 nt, synthetic construct
  source 1..14: mol_type = other RNA
attagagaatgatt

SEQ ID NO: 391 - RNA, 14 nt, synthetic construct
  source 1..14: mol_type = other RNA
agggaaagctattc

SEQ ID NO: 392 - RNA, 14 nt, synthetic construct
  source 1..14: mol_type = other RNA
agacaagaatttcc

SEQ ID NO: 393 - RNA, 14 nt, synthetic construct
  source 1..14: mol_type = other RNA
gaaccaaaattcaa

SEQ ID NO: 394 - RNA, 14 nt, synthetic construct
  source 1..14: mol_type = other RNA
ttgtaaagctcact

SEQ ID NO: 395 - RNA, 14 nt, synthetic construct
  source 1..14: mol_type = other RNA
agtgtaccatgttt

SEQ ID NO: 396 - RNA, 14 nt, synthetic construct
  source 1..14: mol_type = other RNA
agtcatagagtcta

SEQ ID NO: 397 - RNA, 14 nt, synthetic construct
  source 1..14: mol_type = other RNA
gactcccaagaaaa

SEQ ID NO: 398 - RNA, 14 nt, synthetic construct
  source 1..14: mol_type = other RNA
atctccttgcctac

SEQ ID NO: 399 - RNA, 14 nt, synthetic construct
  source 1..14: mol_type = other RNA
atggaggtggcttt

SEQ ID NO: 400 - RNA, 14 nt, synthetic construct
  source 1..14: mol_type = other RNA
gaaaagaaatctta

SEQ ID NO: 401 - RNA, 14 nt, synthetic construct
  source 1..14: mol_type = other RNA
aagtttgcagcttt

SEQ ID NO: 402 - RNA, 14 nt, synthetic construct
  source 1..14: mol_type = other RNA
ttgcttttattaga

SEQ ID NO: 403 - RNA, 14 nt, synthetic construct
  source 1..14: mol_type = other RNA
tgcacaaacaattg

SEQ ID NO: 404 - RNA, 14 nt, synthetic construct
  source 1..14: mol_type = other RNA
agagaagctttggt

SEQ ID NO: 405 - RNA, 14 nt, synthetic construct
  source 1..14: mol_type = other RNA
aagaaaacagttgc

SEQ ID NO: 406 - RNA, 14 nt, synthetic construct
  source 1..14: mol_type = other RNA
ttgtatcaaagcat

SEQ ID NO: 407 - RNA, 14 nt, synthetic construct
  source 1..14: mol_type = other RNA
aatttagatgaatt

SEQ ID NO: 408 - RNA, 14 nt, synthetic construct
  source 1..14: mol_type = other RNA
attacatcgtcaca

SEQ ID NO: 409 - RNA, 14 nt, synthetic construct
  source 1..14: mol_type = other RNA
ataaacagtgtacc

SEQ ID NO: 410 - RNA, 14 nt, synthetic construct
  source 1..14: mol_type = other RNA
agtacaaggcaacc

SEQ ID NO: 411 - RNA, 14 nt, synthetic construct
  source 1..14: mol_type = other RNA
aagaatttccttgg

SEQ ID NO: 412 - RNA, 14 nt, synthetic construct
  source 1..14: mol_type = other RNA
ttcagtctggttaa

SEQ ID NO: 413 - RNA, 14 nt, synthetic construct
  source 1..14: mol_type = other RNA
agaaatagctgcta

SEQ ID NO: 414 - RNA, 14 nt, synthetic construct
  source 1..14: mol_type = other RNA
atctacaaaactgg

SEQ ID NO: 415 - RNA, 14 nt, synthetic construct
  source 1..14: mol_type = other RNA
aacaggaaatcatt

SEQ ID NO: 416 - RNA, 14 nt, synthetic construct
  source 1..14: mol_type = other RNA
gtgagatcttgtct

SEQ ID NO: 417 - RNA, 14 nt, synthetic construct
  source 1..14: mol_type = other RNA
taaaggtaatccac

SEQ ID NO: 418 - RNA, 14 nt, synthetic construct
  source 1..14: mol_type = other RNA
aattcacagtatca

SEQ ID NO: 419 - RNA, 14 nt, synthetic construct
  source 1..14: mol_type = other RNA
gttgtcccagtatt

SEQ ID NO: 420 - RNA, 14 nt, synthetic construct
  source 1..14: mol_type = other RNA
agtacttaattatg

SEQ ID NO: 421 - RNA, 14 nt, synthetic construct
  source 1..14: mol_type = other RNA
tctgaggaagtttg

SEQ ID NO: 422 - RNA, 14 nt, synthetic construct
  source 1..14: mol_type = other RNA
aataacatggcctt

SEQ ID NO: 423 - RNA, 14 nt, synthetic construct
  source 1..14: mol_type = other RNA
gcatacagtttgca

SEQ ID NO: 424 - RNA, 14 nt, synthetic construct
  source 1..14: mol_type = other RNA
gggaaagctattct

SEQ ID NO: 425 - RNA, 14 nt, synthetic construct
  source 1..14: mol_type = other RNA
gaaaattcacagta

SEQ ID NO: 426 - RNA, 14 nt, synthetic construct
  source 1..14: mol_type = other RNA
ctctttgaagttgg

SEQ ID NO: 427 - RNA, 14 nt, synthetic construct
  source 1..14: mol_type = other RNA
atatcaaaattcag

SEQ ID NO: 428 - RNA, 14 nt, synthetic construct
  source 1..14: mol_type = other RNA
atcttacagccttt

SEQ ID NO: 429 - RNA, 14 nt, synthetic construct
  source 1..14: mol_type = other RNA
tactataaaagcaa

SEQ ID NO: 430 - RNA, 14 nt, synthetic construct
  source 1..14: mol_type = other RNA
aagagtacttggac

SEQ ID NO: 431 - RNA, 14 nt, synthetic construct
  source 1..14: mol_type = other RNA
agcagaattagtgt

SEQ ID NO: 432 - RNA, 14 nt, synthetic construct
  source 1..14: mol_type = other RNA
agtaagcaagccag

SEQ ID NO: 433 - RNA, 14 nt, synthetic construct
  source 1..14: mol_type = other RNA
aagtacaaggcaac

SEQ ID NO: 434 - RNA, 14 nt, synthetic construct
  source 1..14: mol_type = other RNA
ctacagaaatgctg

SEQ ID NO: 435 - RNA, 14 nt, synthetic construct
  source 1..14: mol_type = other RNA
ttatcaaagtataa

SEQ ID NO: 436 - RNA, 14 nt, synthetic construct
  source 1..14: mol_type = other RNA
aagacagtacttaa

SEQ ID NO: 437 - RNA, 14 nt, synthetic construct
  source 1..14: mol_type = other RNA
gaggaagtttgcag

SEQ ID NO: 438 - RNA, 14 nt, synthetic construct
  source 1..14: mol_type = other RNA
agagaaactgtctt

SEQ ID NO: 439 - RNA, 14 nt, synthetic construct
  source 1..14: mol_type = other RNA
cctacaaactgaat

SEQ ID NO: 440 - RNA, 14 nt, synthetic construct
  source 1..14: mol_type = other RNA
gtataaacattcca

SEQ ID NO: 441 - RNA, 14 nt, synthetic construct
  source 1..14: mol_type = other RNA
tgaagaccctgtta

SEQ ID NO: 442 - RNA, 14 nt, synthetic construct
  source 1..14: mol_type = other RNA
atgcaacaatctct

SEQ ID NO: 443 - RNA, 14 nt, synthetic construct
  source 1..14: mol_type = other RNA
aatgcagatgactc

SEQ ID NO: 444 - RNA, 14 nt, synthetic construct
  source 1..14: mol_type = other RNA
aaatataaacattc

SEQ ID NO: 445 - RNA, 14 nt, synthetic construct
  source 1..14: mol_type = other RNA
gttcatcttgttcc

SEQ ID NO: 446 - RNA, 14 nt, synthetic construct
  source 1..14: mol_type = other RNA
gaggcagaaatacc

SEQ ID NO: 447 - RNA, 14 nt, synthetic construct
  source 1..14: mol_type = other RNA
gggatgcagttctg

SEQ ID NO: 448 - RNA, 14 nt, synthetic construct
  source 1..14: mol_type = other RNA
attggacaccggaa

SEQ ID NO: 449 - RNA, 14 nt, synthetic construct
  source 1..14: mol_type = other RNA
acaaacaattgatg

SEQ ID NO: 450 - RNA, 14 nt, synthetic construct
  source 1..14: mol_type = other RNA
ttggaaagagtatt

SEQ ID NO: 451 - RNA, 14 nt, synthetic construct
  source 1..14: mol_type = other RNA
actgaagcatttga

SEQ ID NO: 452 - RNA, 14 nt, synthetic construct
  source 1..14: mol_type = other RNA
agtggcacttgctt

SEQ ID NO: 453 - RNA, 14 nt, synthetic construct
  source 1..14: mol_type = other RNA
acaatctctattaa

SEQ ID NO: 454 - RNA, 14 nt, synthetic construct
  source 1..14: mol_type = other RNA
gcaacaatctctat

SEQ ID NO: 455 - RNA, 14 nt, synthetic construct
  source 1..14: mol_type = other RNA
gacgaaaggagttc

SEQ ID NO: 456 - RNA, 14 nt, synthetic construct
  source 1..14: mol_type = other RNA
aattataaaatgac

SEQ ID NO: 457 - RNA, 14 nt, synthetic construct
  source 1..14: mol_type = other RNA
gtatttcaattctt

SEQ ID NO: 458 - RNA, 14 nt, synthetic construct
  source 1..14: mol_type = other RNA
attagaaaggcttt

SEQ ID NO: 459 - RNA, 14 nt, synthetic construct
  source 1..14: mol_type = other RNA
tggttaaatattga

SEQ ID NO: 460 - RNA, 14 nt, synthetic construct
  source 1..14: mol_type = other RNA
aaatgaatatacca

SEQ ID NO: 461 - RNA, 14 nt, synthetic construct
  source 1..14: mol_type = other RNA
gttcaattgtttca

SEQ ID NO: 462 - RNA, 14 nt, synthetic construct
  source 1..14: mol_type = other RNA
aaaagcaagatatt

SEQ ID NO: 463 - RNA, 14 nt, synthetic construct
  source 1..14: mol_type = other RNA
atctgacaatctct

SEQ ID NO: 464 - RNA, 14 nt, synthetic construct
  source 1..14: mol_type = other RNA
taaatggaattgct

SEQ ID NO: 465 - RNA, 14 nt, synthetic construct
  source 1..14: mol_type = other RNA
agttatcctgataa

SEQ ID NO: 466 - RNA, 14 nt, synthetic construct
  source 1..14: mol_type = other RNA
aagccagaaattcg

SEQ ID NO: 467 - RNA, 14 nt, synthetic construct
  source 1..14: mol_type = other RNA
cagtctgaacttga

SEQ ID NO: 468 - RNA, 14 nt, synthetic construct
  source 1..14: mol_type = other RNA
aaaccagtacctct

SEQ ID NO: 469 - RNA, 14 nt, synthetic construct
  source 1..14: mol_type = other RNA
tgaaagaaaatacc

SEQ ID NO: 470 - RNA, 14 nt, synthetic construct
  source 1..14: mol_type = other RNA
caaaaccagtacct

SEQ ID NO: 471 - RNA, 14 nt, synthetic construct
  source 1..14: mol_type = other RNA
gtggagggaatctg

SEQ ID NO: 472 - RNA, 14 nt, synthetic construct
  source 1..14: mol_type = other RNA
agaaatgctgacta

SEQ ID NO: 473 - RNA, 14 nt, synthetic construct
  source 1..14: mol_type = other RNA
agctccgtgctaat

SEQ ID NO: 474 - RNA, 14 nt, synthetic construct
  source 1..14: mol_type = other RNA
aactgtgtctctta

SEQ ID NO: 475 - RNA, 14 nt, synthetic construct
  source 1..14: mol_type = other RNA
gacacaacatgttc

SEQ ID NO: 476 - RNA, 14 nt, synthetic construct
  source 1..14: mol_type = other RNA
agtttgcacttatg

SEQ ID NO: 477 - RNA, 14 nt, synthetic construct
  source 1..14: mol_type = other RNA
acaaactgaatttg

SEQ ID NO: 478 - RNA, 14 nt, synthetic construct
  source 1..14: mol_type = other RNA
aaaggactgcttgt

SEQ ID NO: 479 - RNA, 14 nt, synthetic construct
  source 1..14: mol_type = other RNA
ttttgggaatactt

SEQ ID NO: 480 - RNA, 14 nt, synthetic construct
  source 1..14: mol_type = other RNA
ctttactgtgattg

SEQ ID NO: 481 - RNA, 14 nt, synthetic construct
  source 1..14: mol_type = other RNA
aagggaaagctatt

SEQ ID NO: 482 - RNA, 14 nt, synthetic construct
  source 1..14: mol_type = other RNA
agtatcaaccaata

SEQ ID NO: 483 - RNA, 14 nt, synthetic construct
  source 1..14: mol_type = other RNA
attggccatttctg

SEQ ID NO: 484 - RNA, 14 nt, synthetic construct
  source 1..14: mol_type = other RNA
aactctgattacaa

SEQ ID NO: 485 - RNA, 14 nt, synthetic construct
  source 1..14: mol_type = other RNA
attaaagcctgagt

SEQ ID NO: 486 - RNA, 14 nt, synthetic construct
  source 1..14: mol_type = other RNA
agaagaaatagctg

SEQ ID NO: 487 - RNA, 14 nt, synthetic construct
  source 1..14: mol_type = other RNA
taaaagcaagatat

SEQ ID NO: 488 - RNA, 14 nt, synthetic construct
  source 1..14: mol_type = other RNA
atgatgaaccttgt

SEQ ID NO: 489 - RNA, 14 nt, synthetic construct
  source 1..14: mol_type = other RNA
atgcaaaacacaat

SEQ ID NO: 490 - RNA, 14 nt, synthetic construct
  source 1..14: mol_type = other RNA
ttctttattgtggc

SEQ ID NO: 491 - RNA, 14 nt, synthetic construct
  source 1..14: mol_type = other RNA
aaaggtaatccacc

SEQ ID NO: 492 - RNA, 14 nt, synthetic construct
  source 1..14: mol_type = other RNA
tttgaagagagaag

SEQ ID NO: 493 - RNA, 14 nt, synthetic construct
  source 1..14: mol_type = other RNA
attgaagcatccca

SEQ ID NO: 494 - RNA, 14 nt, synthetic construct
  source 1..14: mol_type = other RNA
agtttagaagattt

SEQ ID NO: 495 - RNA, 14 nt, synthetic construct
  source 1..14: mol_type = other RNA
tacaaactgaattt

SEQ ID NO: 496 - RNA, 14 nt, synthetic construct
  source 1..14: mol_type = other RNA
ttataaaatgacag

SEQ ID NO: 497 - RNA, 14 nt, synthetic construct
  source 1..14: mol_type = other RNA
tgtatcaaagcatt

SEQ ID NO: 498 - RNA, 14 nt, synthetic construct
  source 1..14: mol_type = other RNA
aaatataaagagga

SEQ ID NO: 499 - RNA, 14 nt, synthetic construct
  source 1..14: mol_type = other RNA
ttagatgaatttgc

SEQ ID NO: 500 - RNA, 14 nt, synthetic construct
  source 1..14: mol_type = other RNA
atgtgtatttggaa

SEQ ID NO: 501 - RNA, 33 nt, synthetic construct
  source 1..33: mol_type = other RNA
acacagtttggcctggagaaggccaaactgtgt

SEQ ID NO: 502 - RNA, 33 nt, synthetic construct
  source 1..33: mol_type = other RNA
ggaatcttgaagtcaggaagacttcaagattcc

SEQ ID NO: 503 - RNA, 33 nt, synthetic construct
  source 1..33: mol_type = other RNA
ctgggcttgtagctggcacagctacaagcccag

SEQ ID NO: 504 - RNA, 33 nt, synthetic construct
  source 1..33: mol_type = other RNA
tcaagtaattatagtgagtctataattacttga

SEQ ID NO: 505 - RNA, 33 nt, synthetic construct
  source 1..33: mol_type = other RNA
aaacaggtttgtctgtatgagacaaacctgttt

SEQ ID NO: 506 - RNA, 33 nt, synthetic construct
  source 1..33: mol_type = other RNA
gcagacattttaacacagagttaaaatgtctgc

SEQ ID NO: 507 - RNA, 33 nt, synthetic construct
  source 1..33: mol_type = other RNA
acctggagctggttgccacaaccagctccaggt

SEQ ID NO: 508 - RNA, 33 nt, synthetic construct
  source 1..33: mol_type = other RNA
gataaaatcaagtaattattacttgattttatc

SEQ ID NO: 509 - RNA, 33 nt, synthetic construct
  source 1..33: mol_type = other RNA
gacacagtttggcctggagggccaaactgtgtc

SEQ ID NO: 510 - RNA, 33 nt, synthetic construct
  source 1..33: mol_type = other RNA
cggaatcttgaagtcaggaacttcaagattccg

SEQ ID NO: 511 - RNA, 33 nt, synthetic construct
  source 1..33: mol_type = other RNA
agacattttaacacagaacgtgttaaaatgtct

SEQ ID NO: 512 - RNA, 33 nt, synthetic construct
  source 1..33: mol_type = other RNA
tgaagtcaggaaaagagatttttcctgacttca

SEQ ID NO: 513 - RNA, 33 nt, synthetic construct
  source 1..33: mol_type = other RNA
cacagtttggcctggagaacaggccaaactgtg

SEQ ID NO: 514 - RNA, 33 nt, synthetic construct
  source 1..33: mol_type = other RNA
aattatagtgagttattttaactcactataatt

SEQ ID NO: 515 - RNA, 33 nt, synthetic construct
  source 1..33: mol_type = other RNA
tccaagtcagatgtctcttacatctgacttgga

SEQ ID NO: 516 - RNA, 33 nt, synthetic construct
  source 1..33: mol_type = other RNA
tcaggaaaagagataattcatctcttttcctga

SEQ ID NO: 517 - RNA, 33 nt, synthetic construct
  source 1..33: mol_type = other RNA
ggcaagacatattctttaagaatatgtcttgcc

SEQ ID NO: 518 - RNA, 33 nt, synthetic construct
  source 1..33: mol_type = other RNA
gaaggccaatttccagaggggaaattggccttc

SEQ ID NO: 519 - RNA, 33 nt, synthetic construct
  source 1..33: mol_type = other RNA
caagtaattatagtgagttactataattacttg

SEQ ID NO: 520 - RNA, 33 nt, synthetic construct
  source 1..33: mol_type = other RNA
ataaaatcaagtaattatattacttgattttat

SEQ ID NO: 521 - RNA, 33 nt, synthetic construct
  source 1..33: mol_type = other RNA
atcaagtaattatagtgagtataattacttgat

SEQ ID NO: 522 - RNA, 33 nt, synthetic construct
  source 1..33: mol_type = other RNA
gccaatttccagaggaagcctctggaaattggc

SEQ ID NO: 523 - RNA, 33 nt, synthetic construct
  source 1..33: mol_type = other RNA
agtaattatagtgagttattcactataattact

SEQ ID NO: 524 - RNA, 33 nt, synthetic construct
  source 1..33: mol_type = other RNA
taaaggtacttgttgtttaaacaagtaccttta

SEQ ID NO: 525 - RNA, 33 nt, synthetic construct
  source 1..33: mol_type = other RNA
gactgctgtttcagaatcactgaaacagcagtc

SEQ ID NO: 526 - RNA, 33 nt, synthetic construct
  source 1..33: mol_type = other RNA
actgctgtttcagaatcaatctgaaacagcagt

SEQ ID NO: 527 - RNA, 33 nt, synthetic construct
  source 1..33: mol_type = other RNA
atataaaggtacttgttgtaagtacctttatat

SEQ ID NO: 528 - RNA, 33 nt, synthetic construct
  source 1..33: mol_type = other RNA
tgtaaacagttcctttcaaaggaactgtttaca

SEQ ID NO: 529 - RNA, 33 nt, synthetic construct
  source 1..33: mol_type = other RNA
ggtaactttggctgagagacagccaaagttacc

SEQ ID NO: 530 - RNA, 33 nt, synthetic construct
  source 1..33: mol_type = other RNA
tatagttgtaaacagttcctgtttacaactata

SEQ ID NO: 531 - RNA, 33 nt, synthetic construct
  source 1..33: mol_type = other RNA
acatattctttaacttcaagttaaagaatatgt

SEQ ID NO: 532 - RNA, 33 nt, synthetic construct
  source 1..33: mol_type = other RNA
aagcagtccttttacactctaaaaggactgctt

SEQ ID NO: 533 - RNA, 33 nt, synthetic construct
  source 1..33: mol_type = other RNA
tagtgagttattttgtcaaaaaataactcacta

SEQ ID NO: 534 - RNA, 33 nt, synthetic construct
  source 1..33: mol_type = other RNA
aggaagacatctttgaacaaaagatgtcttcct

SEQ ID NO: 535 - RNA, 33 nt, synthetic construct
  source 1..33: mol_type = other RNA
gcagtccttttacactcaatgtaaaaggactgc

SEQ ID NO: 536 - RNA, 33 nt, synthetic construct
  source 1..33: mol_type = other RNA
agttattttgtcaatatatttgacaaaataact

SEQ ID NO: 537 - RNA, 33 nt, synthetic construct
  source 1..33: mol_type = other RNA
gtacaacagaatatggtatatattctgttgtac

SEQ ID NO: 538 - RNA, 33 nt, synthetic construct
  source 1..33: mol_type = other RNA
gttattttgtcaatatatgattgacaaaataac

SEQ ID NO: 539 - RNA, 33 nt, synthetic construct
  source 1..33: mol_type = other RNA
caggcttcaggaaaagaggtttcctgaagcctg

SEQ ID NO: 540 - RNA, 33 nt, synthetic construct
  source 1..33: mol_type = other RNA
aggaaaagagataattccattatctcttttcct

SEQ ID NO: 541 - RNA, 33 nt, synthetic construct
  source 1..33: mol_type = other RNA
tgttacagcaatataaaggatattgctgtaaca

SEQ ID NO: 542 - RNA, 33 nt, synthetic construct
  source 1..33: mol_type = other RNA
tataagcatatgcaatctctgcatatgcttata

SEQ ID NO: 543 - RNA, 33 nt, synthetic construct
  source 1..33: mol_type = other RNA
catattctttaacttcaaaagttaaagaatatg

SEQ ID NO: 544 - RNA, 33 nt, synthetic construct
  source 1..33: mol_type = other RNA
aagacatctttgaacacctttcaaagatgtctt

SEQ ID NO: 545 - RNA, 33 nt, synthetic construct
  source 1..33: mol_type = other RNA
ccaggaagacatctttgaaagatgtcttcctgg

SEQ ID NO: 546 - RNA, 33 nt, synthetic construct
  source 1..33: mol_type = other RNA
tacagcaatataaaggtactttatattgctgta

SEQ ID NO: 547 - RNA, 33 nt, synthetic construct
  source 1..33: mol_type = other RNA
cattgtcataggttattggaacctatgacaatg

SEQ ID NO: 548 - RNA, 33 nt, synthetic construct
  source 1..33: mol_type = other RNA
tgagttattttgtcaatatgacaaaataactca

SEQ ID NO: 549 - RNA, 33 nt, synthetic construct
  source 1..33: mol_type = other RNA
agtgagttattttgtcaatcaaaataactcact

SEQ ID NO: 550 - RNA, 33 nt, synthetic construct
  source 1..33: mol_type = other RNA
gtgagttattttgtcaataacaaaataactcac

SEQ ID NO: 551 - RNA, 33 nt, synthetic construct
  source 1..33: mol_type = other RNA
gaattttccttgaaagatcttcaaggaaaattc

SEQ ID NO: 552 - RNA, 33 nt, synthetic construct
  source 1..33: mol_type = other RNA
actgttacagcaatataaaattgctgtaacagt

SEQ ID NO: 553 - RNA, 33 nt, synthetic construct
  source 1..33: mol_type = other RNA
aaatccattgtcataggttatgacaatggattt

SEQ ID NO: 554 - RNA, 33 nt, synthetic construct
  source 1..33: mol_type = other RNA
aatccattgtcataggttatatgacaatggatt

SEQ ID NO: 555 - RNA, 33 nt, synthetic construct
  source 1..33: mol_type = other RNA
gagaaatccattgtcatagacaatggatttctc

SEQ ID NO: 556 - RNA, 33 nt, synthetic construct
  source 1..33: mol_type = other RNA
aagacatattctttaacttaaagaatatgtctt

SEQ ID NO: 557 - RNA, 33 nt, synthetic construct
  source 1..33: mol_type = other RNA
aagtgcagattccctccacgggaatctgcactt

SEQ ID NO: 558 - RNA, 33 nt, synthetic construct
  source 1..33: mol_type = other RNA
atccattgtcataggttatctatgacaatggat

SEQ ID NO: 559 - RNA, 33 nt, synthetic construct
  source 1..33: mol_type = other RNA
agacatctttgaacaccttgttcaaagatgtct

SEQ ID NO: 560 - RNA, 33 nt, synthetic construct
  source 1..33: mol_type = other RNA
ccattgtcataggttattgacctatgacaatgg

SEQ ID NO: 561 - RNA, 33 nt, synthetic construct
  source 1..33: mol_type = other RNA
tgaagagaaatccattgtctggatttctcttca

SEQ ID NO: 562 - RNA, 33 nt, synthetic construct
  source 1..33: mol_type = other RNA
gacatattctttaacttcattaaagaatatgtc

SEQ ID NO: 563 - RNA, 33 nt, synthetic construct
  source 1..33: mol_type = other RNA
cagtccttttacactcaaagtgtaaaaggactg

SEQ ID NO: 564 - RNA, 33 nt, synthetic construct
  source 1..33: mol_type = other RNA
aattttccttgaaagatcctttcaaggaaaatt

SEQ ID NO: 565 - RNA, 33 nt, synthetic construct
  source 1..33: mol_type = other RNA
tgaaattgtattttatctgaaaatacaatttca

SEQ ID NO: 566 - RNA, 33 nt, synthetic construct
  source 1..33: mol_type = other RNA
agtaatttcaaaattcttaattttgaaattact

SEQ ID NO: 567 - RNA, 33 nt, synthetic construct
  source 1..33: mol_type = other RNA
caaaattcttaaagttcttctttaagaattttg

SEQ ID NO: 568 - RNA, 33 nt, synthetic construct
  source 1..33: mol_type = other RNA
tgaattttggttctgctctagaaccaaaattca

SEQ ID NO: 569 - RNA, 33 nt, synthetic construct
  source 1..33: mol_type = other RNA
tgtcattttataattatgtattataaaatgaca

SEQ ID NO: 570 - RNA, 33 nt, synthetic construct
  source 1..33: mol_type = other RNA
ccaaatcctgtactgacaaagtacaggatttgg

SEQ ID NO: 571 - RNA, 33 nt, synthetic construct
  source 1..33: mol_type = other RNA
ggataacttttaatagagaattaaaagttatcc

SEQ ID NO: 572 - RNA, 33 nt, synthetic construct
  source 1..33: mol_type = other RNA
tttaagtcttctcttattcagagaagacttaaa

SEQ ID NO: 573 - RNA, 33 nt, synthetic construct
  source 1..33: mol_type = other RNA
gataattccaatatgatcaatattggaattatc

SEQ ID NO: 574 - RNA, 33 nt, synthetic construct
  source 1..33: mol_type = other RNA
ggataaatgaacatggcctatgttcatttatcc

SEQ ID NO: 575 - RNA, 33 nt, synthetic construct
  source 1..33: mol_type = other RNA
caaggttcatcattttcttaatgatgaaccttg

SEQ ID NO: 576 - RNA, 33 nt, synthetic construct
  source 1..33: mol_type = other RNA
tggaagtgctataaaacatttatagcacttcca

SEQ ID NO: 577 - RNA, 33 nt, synthetic construct
  source 1..33: mol_type = other RNA
ccaagtactcttaaagcaattaagagtacttgg

SEQ ID NO: 578 - RNA, 33 nt, synthetic construct
  source 1..33: mol_type = other RNA
tccaatgatttcctgtttcaggaaatcattgga

SEQ ID NO: 579 - RNA, 33 nt, synthetic construct
  source 1..33: mol_type = other RNA
tatggtatattcatttccaatgaatataccata

SEQ ID NO: 580 - RNA, 33 nt, synthetic construct
  source 1..33: mol_type = other RNA
gaacaagatgaacttcccaagttcatcttgttc

SEQ ID NO: 581 - RNA, 33 nt, synthetic construct
  source 1..33: mol_type = other RNA
tgaacttcaggaattttagattcctgaagttca

SEQ ID NO: 582 - RNA, 33 nt, synthetic construct
  source 1..33: mol_type = other RNA
aagtcttctcttattccaaataagagaagactt

SEQ ID NO: 583 - RNA, 33 nt, synthetic construct
  source 1..33: mol_type = other RNA
gaatgtttatactttgataaagtataaacattc

SEQ ID NO: 584 - RNA, 33 nt, synthetic construct
  source 1..33: mol_type = other RNA
ccggaatcgtacacaaagggtgtacgattccgg

SEQ ID NO: 585 - RNA, 33 nt, synthetic construct
  source 1..33: mol_type = other RNA
catacctctgctcttctgaagagcagaggtatg

SEQ ID NO: 586 - RNA, 33 nt, synthetic construct
  source 1..33: mol_type = other RNA
gatcaatttcttctaccatagaagaaattgatc

SEQ ID NO: 587 - RNA, 33 nt, synthetic construct
  source 1..33: mol_type = other RNA
caacattgtgttttgcattaaaacacaatgttg

SEQ ID NO: 588 - RNA, 33 nt, synthetic construct
  source 1..33: mol_type = other RNA
taactttataagcatatgctgcttataaagtta

SEQ ID NO: 589 - RNA, 33 nt, synthetic construct
  source 1..33: mol_type = other RNA
caggataacttttaatagataaaagttatcctg

SEQ ID NO: 590 - RNA, 33 nt, synthetic construct
  source 1..33: mol_type = other RNA
ttttattggttgatactgtatcaaccaataaaa

SEQ ID NO: 591 - RNA, 33 nt, synthetic construct
  source 1..33: mol_type = other RNA
tgcaactgttttcttctggagaaaacagttgca

SEQ ID NO: 592 - RNA, 33 nt, synthetic construct
  source 1..33: mol_type = other RNA
tgctttgatacaacttccagttgtatcaaagca

SEQ ID NO: 593 - RNA, 33 nt, synthetic construct
  source 1..33: mol_type = other RNA
ccaaagcttctctcttcaagagagaagctttgg

SEQ ID NO: 594 - RNA, 33 nt, synthetic construct
  source 1..33: mol_type = other RNA
gggaactcctttcgtctgccgaaaggagttccc

SEQ ID NO: 595 - RNA, 33 nt, synthetic construct
  source 1..33: mol_type = other RNA
tatgacagttctttgactgaaagaactgtcata

SEQ ID NO: 596 - RNA, 33 nt, synthetic construct
  source 1..33: mol_type = other RNA
ttgcagaataacatgtccaatgttattctgcaa

SEQ ID NO: 597 - RNA, 33 nt, synthetic construct
  source 1..33: mol_type = other RNA
cagaagtcctatagttgtactataggacttctg

SEQ ID NO: 598 - RNA, 33 nt, synthetic construct
  source 1..33: mol_type = other RNA
gataacttttaatagagattattaaaagttatc

SEQ ID NO: 599 - RNA, 33 nt, synthetic construct
  source 1..33: mol_type = other RNA
actaagatttcttttccaaaaagaaatcttagt

SEQ ID NO: 600 - RNA, 33 nt, synthetic construct
  source 1..33: mol_type = other RNA
gataaatgaacatggcctgcatgttcatttatc

SEQ ID NO: 601 - RNA, 33 nt, synthetic construct
  source 1..33: mol_type = other RNA
gatgaacatgttgtgtctcacaacatgttcatc

SEQ ID NO: 602 - RNA, 33 nt, synthetic construct
  source 1..33: mol_type = other RNA
tgatcatcttttaagtcttttaaaagatgatca

SEQ ID NO: 603 - RNA, 33 nt, synthetic construct
  source 1..33: mol_type = other RNA
gagcaattccatttatcaaaaatggaattgctc

SEQ ID NO: 604 - RNA, 33 nt, synthetic construct
  source 1..33: mol_type = other RNA
tgtgaattttccttgaaagaaggaaaattcaca

SEQ ID NO: 605 - RNA, 33 nt, synthetic construct
  source 1..33: mol_type = other RNA
tcaaaattcttaaagttcttttaagaattttga

SEQ ID NO: 606 - RNA, 33 nt, synthetic construct
  source 1..33: mol_type = other RNA
taaactccagcaccgtcacggtgctggagttta

SEQ ID NO: 607 - RNA, 33 nt, synthetic construct
  source 1..33: mol_type = other RNA
ttgatattggaagtgctatacttccaatatcaa

SEQ ID NO: 608 - RNA, 33 nt, synthetic construct
  source 1..33: mol_type = other RNA
gtgcattcagtgttactggaacactgaatgcac

SEQ ID NO: 609 - RNA, 33 nt, synthetic construct
  source 1..33: mol_type = other RNA
aatgtttatactttgataaaaagtataaacatt

SEQ ID NO: 610 - RNA, 33 nt, synthetic construct
  source 1..33: mol_type = other RNA
aaattgtattttatctggaataaaatacaattt

SEQ ID NO: 611 - RNA, 33 nt, synthetic construct
  source 1..33: mol_type = other RNA
taagtcttctcttattccataagagaagactta

SEQ ID NO: 612 - RNA, 33 nt, synthetic construct
  source 1..33: mol_type = other RNA
agaagtcctatagttgtaaactataggacttct

SEQ ID NO: 613 - RNA, 33 nt, synthetic construct
  source 1..33: mol_type = other RNA
cttgcttttatagtaatttactataaaagcaag

SEQ ID NO: 614 - RNA, 33 nt, synthetic construct
  source 1..33: mol_type = other RNA
tcaacattgtgttttgcataaacacaatgttga

SEQ ID NO: 615 - RNA, 33 nt, synthetic construct
  source 1..33: mol_type = other RNA
aggcagttgtttctaccatagaaacaactgcct

SEQ ID NO: 616 - RNA, 33 nt, synthetic construct
  source 1..33: mol_type = other RNA
tatgatcaatttcttctacagaaattgatcata

SEQ ID NO: 617 - RNA, 33 nt, synthetic construct
  source 1..33: mol_type = other RNA
gtaatttcaaaattcttaaaattttgaaattac

SEQ ID NO: 618 - RNA, 33 nt, synthetic construct
  source 1..33: mol_type = other RNA
atcaacattgtgttttgcaaacacaatgttgat

SEQ ID NO: 619 - RNA, 33 nt, synthetic construct
  source 1..33: mol_type = other RNA
caaagtattcccaaaaggcttgggaatactttg

SEQ ID NO: 620 - RNA, 33 nt, synthetic construct
  source 1..33: mol_type = other RNA
aaaacatggtacactgtttgtgtaccatgtttt

SEQ ID NO: 621 - RNA, 33 nt, synthetic construct
  source 1..33: mol_type = other RNA
acacagaactgcatcccagatgcagttctgtgt

SEQ ID NO: 622 - RNA, 33 nt, synthetic construct
  source 1..33: mol_type = other RNA
tccaagtactcttaaagcataagagtacttgga

SEQ ID NO: 623 - RNA, 33 nt, synthetic construct
  source 1..33: mol_type = other RNA
tgtagtatgacagttctttactgtcatactaca

SEQ ID NO: 624 - RNA, 33 nt, synthetic construct
  source 1..33: mol_type = other RNA
cagaatagctttcccttttggaaagctattctg

SEQ ID NO: 625 - RNA, 33 nt, synthetic construct
  source 1..33: mol_type = other RNA
gcttttatagtaatttcaaattactataaaagc

SEQ ID NO: 626 - RNA, 33 nt, synthetic construct
  source 1..33: mol_type = other RNA
gaagctactccatcatcaagatggagtagcttc

SEQ ID NO: 627 - RNA, 33 nt, synthetic construct
  source 1..33: mol_type = other RNA
tgccactaattctaagtaatagaattagtggca

SEQ ID NO: 628 - RNA, 33 nt, synthetic construct
  source 1..33: mol_type = other RNA
gtagactctatgactgttagtcatagagtctac

SEQ ID NO: 629 - RNA, 33 nt, synthetic construct
  source 1..33: mol_type = other RNA
ctaagatttcttttccaaaaaaagaaatcttag

SEQ ID NO: 630 - RNA, 33 nt, synthetic construct
  source 1..33: mol_type = other RNA
caatatttaaccagactgactggttaaatattg

SEQ ID NO: 631 - RNA, 33 nt, synthetic construct
  source 1..33: mol_type = other RNA
tagtaatttcaaaattcttttttgaaattacta

SEQ ID NO: 632 - RNA, 33 nt, synthetic construct
  source 1..33: mol_type = other RNA
ggaaaagagataattccaaattatctcttttcc

SEQ ID NO: 633 - RNA, 33 nt, synthetic construct
  source 1..33: mol_type = other RNA
aaaatgcttgacacgatgagtgtcaagcatttt

SEQ ID NO: 634 - RNA, 33 nt, synthetic construct
  source 1..33: mol_type = other RNA
tatattcatttccaggaagtggaaatgaatata

SEQ ID NO: 635 - RNA, 33 nt, synthetic construct
  source 1..33: mol_type = other RNA
taataaaagcaagtgccacacttgcttttatta

SEQ ID NO: 636 - RNA, 33 nt, synthetic construct
  source 1..33: mol_type = other RNA
tactatgcgtttgtaatcaacaaacgcatagta

SEQ ID NO: 637 - RNA, 33 nt, synthetic construct
  source 1..33: mol_type = other RNA
gaattgaaatactctttccgagtatttcaattc

SEQ ID NO: 638 - RNA, 33 nt, synthetic construct
  source 1..33: mol_type = other RNA
tcaggataacttttaatagaaaagttatcctga

SEQ ID NO: 639 - RNA, 33 nt, synthetic construct
  source 1..33: mol_type = other RNA
tacaacttccaaatacacaatttggaagttgta

SEQ ID NO: 640 - RNA, 33 nt, synthetic construct
  source 1..33: mol_type = other RNA
aatcattctctaataaaagattagagaatgatt

SEQ ID NO: 641 - RNA, 33 nt, synthetic construct
  source 1..33: mol_type = other RNA
gaatagctttcccttttgaagggaaagctattc

SEQ ID NO: 642 - RNA, 33 nt, synthetic construct
  source 1..33: mol_type = other RNA
ggaaattcttgtctgtcatagacaagaatttcc

SEQ ID NO: 643 - RNA, 33 nt, synthetic construct
  source 1..33: mol_type = other RNA
ttgaattttggttctgctcgaaccaaaattcaa

SEQ ID NO: 644 - RNA, 33 nt, synthetic construct
  source 1..33: mol_type = other RNA
agtgagctttacaaataagttgtaaagctcact

SEQ ID NO: 645 - RNA, 33 nt, synthetic construct
  source 1..33: mol_type = other RNA
aaacatggtacactgtttaagtgtaccatgttt

SEQ ID NO: 646 - RNA, 33 nt, synthetic construct
  source 1..33: mol_type = other RNA
tagactctatgactgttacagtcatagagtcta

SEQ ID NO: 647 - RNA, 33 nt, synthetic construct
  source 1..33: mol_type = other RNA
ttttcttgggagtcatctggactcccaagaaaa

SEQ ID NO: 648 - RNA, 33 nt, synthetic construct
  source 1..33: mol_type = other RNA
gtaggcaaggagatgtccaatctccttgcctac

SEQ ID NO: 649 - RNA, 33 nt, synthetic construct
  source 1..33: mol_type = other RNA
aaagccacctccatacctcatggaggtggcttt

SEQ ID NO: 650 - RNA, 33 nt, synthetic construct
  source 1..33: mol_type = other RNA
taagatttcttttccaaacgaaaagaaatctta

SEQ ID NO: 651 - RNA, 33 nt, synthetic construct
  source 1..33: mol_type = other RNA
aaagctgcaaacttcctcaaagtttgcagcttt

SEQ ID NO: 652 - RNA, 33 nt, synthetic construct
  source 1..33: mol_type = other RNA
tctaataaaagcaagtgccttgcttttattaga

SEQ ID NO: 653 - RNA, 33 nt, synthetic construct
  source 1..33: mol_type = other RNA
caattgtttgtgcattcagtgcacaaacaattg

SEQ ID NO: 654 - RNA, 33 nt, synthetic construct
  source 1..33: mol_type = other RNA
accaaagcttctctcttcaagagaagctttggt

SEQ ID NO: 655 - RNA, 33 nt, synthetic construct
  source 1..33: mol_type = other RNA
gcaactgttttcttctgggaagaaaacagttgc

SEQ ID NO: 656 - RNA, 33 nt, synthetic construct
  source 1..33: mol_type = other RNA
atgctttgatacaacttccttgtatcaaagcat

SEQ ID NO: 657 - RNA, 33 nt, synthetic construct
  source 1..33: mol_type = other RNA
aattcatctaaattagctaaatttagatgaatt

SEQ ID NO: 658 - RNA, 33 nt, synthetic construct
  source 1..33: mol_type = other RNA
tgtgacgatgtaatagaccattacatcgtcaca

SEQ ID NO: 659 - RNA, 33 nt, synthetic construct
  source 1..33: mol_type = other RNA
ggtacactgtttatctggtataaacagtgtacc

SEQ ID NO: 660 - RNA, 33 nt, synthetic construct
  source 1..33: mol_type = other RNA
ggttgccttgtacttgacaagtacaaggcaacc

SEQ ID NO: 661 - RNA, 33 nt, synthetic construct
  source 1..33: mol_type = other RNA
ccaaggaaattcttgtctgaagaatttccttgg

SEQ ID NO: 662 - RNA, 33 nt, synthetic construct
  source 1..33: mol_type = other RNA
ttaaccagactgaatcagattcagtctggttaa

SEQ ID NO: 663 - RNA, 33 nt, synthetic construct
  source 1..33: mol_type = other RNA
tagcagctatttcttctatagaaatagctgcta

SEQ ID NO: 664 - RNA, 33 nt, synthetic construct
  source 1..33: mol_type = other RNA
ccagttttgtagatatccaatctacaaaactgg

SEQ ID NO: 665 - RNA, 33 nt, synthetic construct
  source 1..33: mol_type = other RNA
aatgatttcctgtttccagaacaggaaatcatt

SEQ ID NO: 666 - RNA, 33 nt, synthetic construct
  source 1..33: mol_type = other RNA
agacaagatctcacctacagtgagatcttgtct

SEQ ID NO: 667 - RNA, 33 nt, synthetic construct
  source 1..33: mol_type = other RNA
gtggattacctttaaccaataaaggtaatccac

SEQ ID NO: 668 - RNA, 33 nt, synthetic construct
  source 1..33: mol_type = other RNA
tgatactgtgaattttcctaattcacagtatca

SEQ ID NO: 669 - RNA, 33 nt, synthetic construct
  source 1..33: mol_type = other RNA
aatactgggacaacgctcagttgtcccagtatt

SEQ ID NO: 670 - RNA, 33 nt, synthetic construct
  source 1..33: mol_type = other RNA
cataattaagtactgtcttagtacttaattatg

SEQ ID NO: 671 - RNA, 33 nt, synthetic construct
  source 1..33: mol_type = other RNA
caaacttcctcagaggtactctgaggaagtttg

SEQ ID NO: 672 - RNA, 33 nt, synthetic construct
  source 1..33: mol_type = other RNA
aaggccatgttatttcagaaataacatggcctt

SEQ ID NO: 673 - RNA, 33 nt, synthetic construct
  source 1..33: mol_type = other RNA
tgcaaactgtatgcagctggcatacagtttgca

SEQ ID NO: 674 - RNA, 33 nt, synthetic construct
  source 1..33: mol_type = other RNA
agaatagctttcccttttggggaaagctattct

SEQ ID NO: 675 - RNA, 33 nt, synthetic construct
  source 1..33: mol_type = other RNA
tactgtgaattttccttgagaaaattcacagta

SEQ ID NO: 676 - RNA, 33 nt, synthetic construct
  source 1..33: mol_type = other RNA
ccaacttcaaagagttcaactctttgaagttgg

SEQ ID NO: 677 - RNA, 33 nt, synthetic construct
  source 1..33: mol_type = other RNA
ctgaattttgatattggaaatatcaaaattcag

SEQ ID NO: 678 - RNA, 33 nt, synthetic construct
  source 1..33: mol_type = other RNA
aaaggctgtaagatataagatcttacagccttt

SEQ ID NO: 679 - RNA, 33 nt, synthetic construct
  source 1..33: mol_type = other RNA
ttgcttttatagtaatttctactataaaagcaa

SEQ ID NO: 680 - RNA, 33 nt, synthetic construct
  source 1..33: mol_type = other RNA
gtccaagtactcttaaagcaagagtacttggac

SEQ ID NO: 681 - RNA, 33 nt, synthetic construct
  source 1..33: mol_type = other RNA
acactaattctgctgtctgagcagaattagtgt

SEQ ID NO: 682 - RNA, 33 nt, synthetic construct
  source 1..33: mol_type = other RNA
ctggcttgcttactggtaaagtaagcaagccag

SEQ ID NO: 683 - RNA, 33 nt, synthetic construct
  source 1..33: mol_type = other RNA
gttgccttgtacttgacaaaagtacaaggcaac

SEQ ID NO: 684 - RNA, 33 nt, synthetic construct
  source 1..33: mol_type = other RNA
cagcatttctgtaggacatctacagaaatgctg

SEQ ID NO: 685 - RNA, 33 nt, synthetic construct
  source 1..33: mol_type = other RNA
ttatactttgataagatgcttatcaaagtataa

SEQ ID NO: 686 - RNA, 33 nt, synthetic construct
  source 1..33: mol_type = other RNA
ttaagtactgtcttcctttaagacagtacttaa

SEQ ID NO: 687 - RNA, 33 nt, synthetic construct
  source 1..33: mol_type = other RNA
ctgcaaacttcctcagagggaggaagtttgcag

SEQ ID NO: 688 - RNA, 33 nt, synthetic construct
  source 1..33: mol_type = other RNA
aagacagtttctcttttggagagaaactgtctt

SEQ ID NO: 689 - RNA, 33 nt, synthetic construct
  source 1..33: mol_type = other RNA
attcagtttgtagggagagcctacaaactgaat

SEQ ID NO: 690 - RNA, 33 nt, synthetic construct
  source 1..33: mol_type = other RNA
tggaatgtttatactttgagtataaacattcca

SEQ ID NO: 691 - RNA, 33 nt, synthetic construct
  source 1..33: mol_type = other RNA
taacagggtcttcatgtgttgaagaccctgtta

SEQ ID NO: 692 - RNA, 33 nt, synthetic construct
  source 1..33: mol_type = other RNA
agagattgttgcatcaaatatgcaacaatctct

SEQ ID NO: 693 - RNA, 33 nt, synthetic construct
  source 1..33: mol_type = other RNA
gagtcatctgcatttgcataatgcagatgactc

SEQ ID NO: 694 - RNA, 33 nt, synthetic construct
  source 1..33: mol_type = other RNA
gaatgtttatatttagcagaaatataaacattc

SEQ ID NO: 695 - RNA, 33 nt, synthetic construct
  source 1..33: mol_type = other RNA
ggaacaagatgaacttcccgttcatcttgttcc

SEQ ID NO: 696 - RNA, 33 nt, synthetic construct
  source 1..33: mol_type = other RNA
ggtatttctgcctcttcaggaggcagaaatacc

SEQ ID NO: 697 - RNA, 33 nt, synthetic construct
  source 1..33: mol_type = other RNA
cagaactgcatcccagaaggggatgcagttctg

SEQ ID NO: 698 - RNA, 33 nt, synthetic construct
  source 1..33: mol_type = other RNA
ttccggtgtccaataacctattggacaccggaa

SEQ ID NO: 699 - RNA, 33 nt, synthetic construct
  source 1..33: mol_type = other RNA
catcaattgtttgtgcattacaaacaattgatg

SEQ ID NO: 700 - RNA, 33 nt, synthetic construct
  source 1..33: mol_type = other RNA
aatactctttccaagggctttggaaagagtatt

SEQ ID NO: 701 - RNA, 33 nt, synthetic construct
  source 1..33: mol_type = other RNA
tcaaatgcttcagtgtatcactgaagcatttga

SEQ ID NO: 702 - RNA, 33 nt, synthetic construct
  source 1..33: mol_type = other RNA
aagcaagtgccactaattcagtggcacttgctt

SEQ ID NO: 703 - RNA, 33 nt, synthetic construct
  source 1..33: mol_type = other RNA
ttaatagagattgttgcatacaatctctattaa

SEQ ID NO: 704 - RNA, 33 nt, synthetic construct
  source 1..33: mol_type = other RNA
atagagattgttgcatcaagcaacaatctctat

SEQ ID NO: 705 - RNA, 33 nt, synthetic construct
  source 1..33: mol_type = other RNA
gaactcctttcgtctgctagacgaaaggagttc

SEQ ID NO: 706 - RNA, 33 nt, synthetic construct
  source 1..33: mol_type = other RNA
gtcattttataattatgtaaattataaaatgac

SEQ ID NO: 707 - RNA, 33 nt, synthetic construct
  source 1..33: mol_type = other RNA
aagaattgaaatactctttgtatttcaattctt

SEQ ID NO: 708 - RNA, 33 nt, synthetic construct
  source 1..33: mol_type = other RNA
aaagcctttctaattccaaattagaaaggcttt

SEQ ID NO: 709 - RNA, 33 nt, synthetic construct
  source 1..33: mol_type = other RNA
tcaatatttaaccagactgtggttaaatattga

SEQ ID NO: 710 - RNA, 33 nt, synthetic construct
  source 1..33: mol_type = other RNA
tggtatattcatttccaggaaatgaatatacca

SEQ ID NO: 711 - RNA, 33 nt, synthetic construct
  source 1..33: mol_type = other RNA
tgaaacaattgaacgaaacgttcaattgtttca

SEQ ID NO: 712 - RNA, 33 nt, synthetic construct
  source 1..33: mol_type = other RNA
aatatcttgcttttatagtaaaagcaagatatt

SEQ ID NO: 713 - RNA, 33 nt, synthetic construct
  source 1..33: mol_type = other RNA
agagattgtcagatccaatatctgacaatctct

SEQ ID NO: 714 - RNA, 33 nt, synthetic construct
  source 1..33: mol_type = other RNA
agcaattccatttatcaactaaatggaattgct

SEQ ID NO: 715 - RNA, 33 nt, synthetic construct
  source 1..33: mol_type = other RNA
ttatcaggataacttttaaagttatcctgataa

SEQ ID NO: 716 - RNA, 33 nt, synthetic construct
  source 1..33: mol_type = other RNA
cgaatttctggcttgcttaaagccagaaattcg

SEQ ID NO: 717 - RNA, 33 nt, synthetic construct
  source 1..33: mol_type = other RNA
tcaagttcagactggtgagcagtctgaacttga

SEQ ID NO: 718 - RNA, 33 nt, synthetic construct
  source 1..33: mol_type = other RNA
agaggtactggttttgtgaaaaccagtacctct

SEQ ID NO: 719 - RNA, 33 nt, synthetic construct
  source 1..33: mol_type = other RNA
ggtattttctttcaagcaatgaaagaaaatacc

SEQ ID NO: 720 - RNA, 33 nt, synthetic construct
  source 1..33: mol_type = other RNA
aggtactggttttgtgaaccaaaaccagtacct

SEQ ID NO: 721 - RNA, 33 nt, synthetic construct
  source 1..33: mol_type = other RNA
cagattccctccacagcaggtggagggaatctg

SEQ ID NO: 722 - RNA, 33 nt, synthetic construct
  source 1..33: mol_type = other RNA
tagtcagcatttctgtaggagaaatgctgacta

SEQ ID NO: 723 - RNA, 33 nt, synthetic construct
  source 1..33: mol_type = other RNA
attagcacggagctggcttagctccgtgctaat

SEQ ID NO: 724 - RNA, 33 nt, synthetic construct
  source 1..33: mol_type = other RNA
taagagacacagtttggccaactgtgtctctta

SEQ ID NO: 725 - RNA, 33 nt, synthetic construct
  source 1..33: mol_type = other RNA
gaacatgttgtgtctctaggacacaacatgttc

SEQ ID NO: 726 - RNA, 33 nt, synthetic construct
  source 1..33: mol_type = other RNA
cataagtgcaaactgtatgagtttgcacttatg

SEQ ID NO: 727 - RNA, 33 nt, synthetic construct
  source 1..33: mol_type = other RNA
caaattcagtttgtagggaacaaactgaatttg

SEQ ID NO: 728 - RNA, 33 nt, synthetic construct
  source 1..33: mol_type = other RNA
acaagcagtccttttacacaaaggactgcttgt

SEQ ID NO: 729 - RNA, 33 nt, synthetic construct
  source 1..33: mol_type = other RNA
aagtattcccaaaaggcccttttgggaatactt

SEQ ID NO: 730 - RNA, 33 nt, synthetic construct
  source 1..33: mol_type = other RNA
caatcacagtaaaggctgtctttactgtgattg

SEQ ID NO: 731 - RNA, 33 nt, synthetic construct
  source 1..33: mol_type = other RNA
aatagctttcccttttgacaagggaaagctatt

SEQ ID NO: 732 - RNA, 33 nt, synthetic construct
  source 1..33: mol_type = other RNA
tattggttgatactgtgaaagtatcaaccaata

SEQ ID NO: 733 - RNA, 33 nt, synthetic construct
  source 1..33: mol_type = other RNA
cagaaatggccaatgtaaaattggccatttctg

SEQ ID NO: 734 - RNA, 33 nt, synthetic construct
  source 1..33: mol_type = other RNA
ttgtaatcagagtttccgtaactctgattacaa

SEQ ID NO: 735 - RNA, 33 nt, synthetic construct
  source 1..33: mol_type = other RNA
actcaggctttaatgatcaattaaagcctgagt

SEQ ID NO: 736 - RNA, 33 nt, synthetic construct
  source 1..33: mol_type = other RNA
cagctatttcttctatcttagaagaaatagctg

SEQ ID NO: 737 - RNA, 33 nt, synthetic construct
  source 1..33: mol_type = other RNA
atatcttgcttttatagtataaaagcaagatat

SEQ ID NO: 738 - RNA, 33 nt, synthetic construct
  source 1..33: mol_type = other RNA
acaaggttcatcattttctatgatgaaccttgt

SEQ ID NO: 739 - RNA, 33 nt, synthetic construct
  source 1..33: mol_type = other RNA
attgtgttttgcattgctgatgcaaaacacaat

SEQ ID NO: 740 - RNA, 33 nt, synthetic construct
  source 1..33: mol_type = other RNA
gccacaataaagaattacattctttattgtggc

SEQ ID NO: 741 - RNA, 33 nt, synthetic construct
  source 1..33: mol_type = other RNA
ggtggattacctttaaccaaaaggtaatccacc

SEQ ID NO: 742 - RNA, 33 nt, synthetic construct
  source 1..33: mol_type = other RNA
cttctctcttcaaagctgatttgaagagagaag

SEQ ID NO: 743 - RNA, 33 nt, synthetic construct
  source 1..33: mol_type = other RNA
tgggatgcttcaatatcctattgaagcatccca

SEQ ID NO: 744 - RNA, 33 nt, synthetic construct
  source 1..33: mol_type = other RNA
aaatcttctaaactgtagtagtttagaagattt

SEQ ID NO: 745 - RNA, 33 nt, synthetic construct
  source 1..33: mol_type = other RNA
aaattcagtttgtagggagtacaaactgaattt

SEQ ID NO: 746 - RNA, 33 nt, synthetic construct
  source 1..33: mol_type = other RNA
ctgtcattttataattatgttataaaatgacag

SEQ ID NO: 747 - RNA, 33 nt, synthetic construct
  source 1..33: mol_type = other RNA
aatgctttgatacaacttctgtatcaaagcatt

SEQ ID NO: 748 - RNA, 33 nt, synthetic construct
  source 1..33: mol_type = other RNA
tcctctttatatttagcctaaatataaagagga

SEQ ID NO: 749 - RNA, 33 nt, synthetic construct
  source 1..33: mol_type = other RNA
gcaaattcatctaaattagttagatgaatttgc

SEQ ID NO: 750 - RNA, 33 nt, synthetic construct
  source 1..33: mol_type = other RNA
ttccaaatacacataagaaatgtgtatttggaa

SEQ ID NO: 751 - RNA, 19 nt, synthetic construct
  source 1..19: mol_type = other RNA
  misc_difference 1: note = 2'-O-methyl modified nucleotide with phosphorothioate linkage may be modified with 5'-Phosphate
  modified_base 2: mod_base = OTHER; note = 2'-fluoro modified nucleotide with phosphorothioate linkage
  modified_base 3: mod_base = OTHER; note = 2'-O-methyl modified nucleotide
  modified_base 4: mod_base = OTHER; note = 2'-fluoro modified nucleotide
  modified_base 5: mod_base = OTHER; note = 2'-O-methyl modified nucleotide
  modified_base 6: mod_base = OTHER; note = 2'-fluoro modified nucleotide
  modified_base 7: mod_base = OTHER; note = 2'-O-methyl modified nucleotide
  modified_base 8: mod_base = OTHER; note = 2'-fluoro modified nucleotide
  modified_base 9: mod_base = OTHER; note = 2'-O-methyl modified nucleotide
  modified_base 10: mod_base = OTHER; note = 2'-fluoro modified nucleotide
  modified_base 11: mod_base = OTHER; note = 2'-O-methyl modified nucleotide
  modified_base 12: mod_base = OTHER; note = 2'-fluoro modified nucleotide
  modified_base 13: mod_base = OTHER; note = 2'-O-methyl modified nucleotide
  modified_base 14: mod_base = OTHER; note = 2'-fluoro modified nucleotide with phosphorothioate linkage
  modified_base 15: mod_base = OTHER; note = 2'-O-methyl modified nucleotide with phosphorothioate linkage
  modified_base 16: mod_base = OTHER; note = 2'-fluoro modified nucleotide with phosphorothioate linkage
  modified_base 17: mod_base = OTHER; note = 2'-O-methyl modified nucleotide with phosphorothioate linkage
  modified_base 18: mod_base = OTHER; note = 2'-fluoro modified nucleotide with phosphorothioate linkage
  misc_difference 19: note = 2'-O-methyl modified nucleotide may be attached to trivalent N-Acetylgalactosamine
tcacagtttggcctggaga

SEQ ID NO: 752 - RNA, 19 nt, synthetic construct
  source 1..19: mol_type = other RNA
  misc_difference 1: note = 2'-O-methyl modified nucleotide with phosphorothioate linkage may be modified with 5'-Phosphate
  modified_base 2: mod_base = OTHER; note = 2'-fluoro modified nucleotide with phosphorothioate linkage
  modified_base 3: mod_base = OTHER; note = 2'-O-methyl modified nucleotide
  modified_base 4: mod_base = OTHER; note = 2'-fluoro modified nucleotide
  modified_base 5: mod_base = OTHER; note = 2'-O-methyl modified nucleotide
  modified_base 6: mod_base = OTHER; note = 2'-fluoro modified nucleotide
  modified_base 7: mod_base = OTHER; note = 2'-O-methyl modified nucleotide
  modified_base 8: mod_base = OTHER; note = 2'-fluoro modified nucleotide
  modified_base 9: mod_base = OTHER; note = 2'-O-methyl modified nucleotide
  modified_base 10: mod_base = OTHER; note = 2'-fluoro modified nucleotide
  modified_base 11: mod_base = OTHER; note = 2'-O-methyl modified nucleotide
  modified_base 12: mod_base = OTHER; note = 2'-fluoro modified nucleotide
  modified_base 13: mod_base = OTHER; note = 2'-O-methyl modified nucleotide
  modified_base 14: mod_base = OTHER; note = 2'-fluoro modified nucleotide with phosphorothioate linkage
  modified_base 15: mod_base = OTHER; note = 2'-O-methyl modified nucleotide with phosphorothioate linkage
  modified_base 16: mod_base = OTHER; note = 2'-fluoro modified nucleotide with phosphorothioate linkage
  modified_base 17: mod_base = OTHER; note = 2'-O-methyl modified nucleotide with phosphorothioate linkage
  modified_base 18: mod_base = OTHER; note = 2'-fluoro modified nucleotide with phosphorothioate linkage
  misc_difference 19: note = 2'-O-methyl modified nucleotide may be attached to trivalent N-Acetylgalactosamine
tgaatcttgaagtcaggaa

SEQ ID NO: 753 - RNA, 19 nt, synthetic construct
  source 1..19: mol_type = other RNA
  misc_difference 1: note = 2'-O-methyl modified nucleotide with phosphorothioate linkage may be modified with 5'-Phosphate
  modified_base 2: mod_base = OTHER; note = 2'-fluoro modified nucleotide with phosphorothioate linkage
  modified_base 3: mod_base = OTHER; note = 2'-O-methyl modified nucleotide
  modified_base 4: mod_base = OTHER; note = 2'-fluoro modified nucleotide
  modified_base 5: mod_base = OTHER; note = 2'-O-methyl modified nucleotide
  modified_base 6: mod_base = OTHER; note = 2'-fluoro modified nucleotide
  modified_base 7: mod_base = OTHER; note = 2'-O-methyl modified nucleotide
  modified_base 8: mod_base = OTHER; note = 2'-fluoro modified nucleotide
  modified_base 9: mod_base = OTHER; note = 2'-O-methyl modified nucleotide
  modified_base 10: mod_base = OTHER; note = 2'-fluoro modified nucleotide
  modified_base 11: mod_base = OTHER; note = 2'-O-methyl modified nucleotide
  modified_base 12: mod_base = OTHER; note = 2'-fluoro modified nucleotide
  modified_base 13: mod_base = OTHER; note = 2'-O-methyl modified nucleotide
  modified_base 14: mod_base = OTHER; note = 2'-fluoro modified nucleotide with phosphorothioate linkage
  modified_base 15: mod_base = OTHER; note = 2'-O-methyl modified nucleotide with phosphorothioate linkage
  modified_base 16: mod_base = OTHER; note = 2'-fluoro modified nucleotide with phosphorothioate linkage
  modified_base 17: mod_base = OTHER; note = 2'-O-methyl modified nucleotide with phosphorothioate linkage
  modified_base 18: mod_base = OTHER; note = 2'-fluoro modified nucleotide with phosphorothioate linkage
  misc_difference 19: note = 2'-O-methyl modified nucleotide may be attached to trivalent N-Acetylgalactosamine
ttgggcttgtagctggcac

SEQ ID NO: 754 - RNA, 19 nt, synthetic construct
  source 1..19: mol_type = other RNA
  misc_difference 1: note = 2'-O-methyl modified nucleotide with phosphorothioate linkage may be modified with 5'-Phosphate
  modified_base 2: mod_base = OTHER; note = 2'-fluoro modified nucleotide with phosphorothioate linkage
  modified_base 3: mod_base = OTHER; note = 2'-O-methyl modified nucleotide
  modified_base 4: mod_base = OTHER; note = 2'-fluoro modified nucleotide
  modified_base 5: mod_base = OTHER; note = 2'-O-methyl modified nucleotide
  modified_base 6: mod_base = OTHER; note = 2'-fluoro modified nucleotide
  modified_base 7: mod_base = OTHER; note = 2'-O-methyl modified nucleotide
  modified_base 8: mod_base = OTHER; note = 2'-fluoro modified nucleotide
  modified_base 9: mod_base = OTHER; note = 2'-O-methyl modified nucleotide
  modified_base 10: mod_base = OTHER; note = 2'-fluoro modified nucleotide
  modified_base 11: mod_base = OTHER; note = 2'-O-methyl modified nucleotide
  modified_base 12: mod_base = OTHER; note = 2'-fluoro modified nucleotide
  modified_base 13: mod_base = OTHER; note = 2'-O-methyl modified nucleotide
  modified_base 14: mod_base = OTHER; note = 2'-fluoro modified nucleotide with phosphorothioate linkage
  modified_base 15: mod_base = OTHER; note = 2'-O-methyl modified nucleotide with phosphorothioate linkage
  modified_base 16: mod_base = OTHER; note = 2'-fluoro modified nucleotide with phosphorothioate linkage
  modified_base 17: mod_base = OTHER; note = 2'-O-methyl modified nucleotide with phosphorothioate linkage
  modified_base 18: mod_base = OTHER; note = 2'-fluoro modified nucleotide with phosphorothioate linkage
  misc_difference 19: note = 2'-O-methyl modified nucleotide may be attached to trivalent N-Acetylgalactosamine
tcaagtaattatagtgagt

SEQ ID NO: 755 - RNA, 19 nt, synthetic construct
  source 1..19: mol_type = other RNA
  misc_difference 1: note = 2'-O-methyl modified nucleotide with phosphorothioate linkage may be modified with 5'-Phosphate
  modified_base 2: mod_base = OTHER; note = 2'-fluoro modified nucleotide with phosphorothioate linkage
  modified_base 3: mod_base = OTHER; note = 2'-O-methyl modified nucleotide
  modified_base 4: mod_base = OTHER; note = 2'-fluoro modified nucleotide
  modified_base 5: mod_base = OTHER; note = 2'-O-methyl modified nucleotide
  modified_base 6: mod_base = OTHER; note = 2'-fluoro modified nucleotide
  modified_base 7: mod_base = OTHER; note = 2'-O-methyl modified nucleotide
  modified_base 8: mod_base = OTHER; note = 2'-fluoro modified nucleotide
  modified_base 9: mod_base = OTHER; note = 2'-O-methyl modified nucleotide
  modified_base 10: mod_base = OTHER; note = 2'-fluoro modified nucleotide
  modified_base 11: mod_base = OTHER; note = 2'-O-methyl modified nucleotide
  modified_base 12: mod_base = OTHER; note = 2'-fluoro modified nucleotide
  modified_base 13: mod_base = OTHER; note = 2'-O-methyl modified nucleotide
  modified_base 14: mod_base = OTHER; note = 2'-fluoro modified nucleotide with phosphorothioate linkage
  modified_base 15: mod_base = OTHER; note = 2'-O-methyl modified nucleotide with phosphorothioate linkage
  modified_base 16: mod_base = OTHER; note = 2'-fluoro modified nucleotide with phosphorothioate linkage
  modified_base 17: mod_base = OTHER; note = 2'-O-methyl modified nucleotide with phosphorothioate linkage
  modified_base 18: mod_base = OTHER; note = 2'-fluoro modified nucleotide with phosphorothioate linkage
  misc_difference 19: note = 2'-O-methyl modified nucleotide may be attached to trivalent N-Acetylgalactosamine
taacaggtttgtctgtatg

SEQ ID NO: 756 - RNA, 19 nt, synthetic construct
  source 1..19: mol_type = other RNA
  misc_difference 1: note = 2'-O-methyl modified nucleotide with phosphorothioate linkage may be modified with 5'-Phosphate
  modified_base 2: mod_base = OTHER; note = 2'-fluoro modified nucleotide with phosphorothioate linkage
  modified_base 3: mod_base = OTHER; note = 2'-O-methyl modified nucleotide
  modified_base 4: mod_base = OTHER; note = 2'-fluoro modified nucleotide
  modified_base 5: mod_base = OTHER; note = 2'-O-methyl modified nucleotide
  modified_base 6: mod_base = OTHER; note = 2'-fluoro modified nucleotide
  modified_base 7: mod_base = OTHER; note = 2'-O-methyl modified nucleotide
  modified_base 8: mod_base = OTHER; note = 2'-fluoro modified nucleotide
  modified_base 9: mod_base = OTHER; note = 2'-O-methyl modified nucleotide
  modified_base 10: mod_base = OTHER; note = 2'-fluoro modified nucleotide
  modified_base 11: mod_base = OTHER; note = 2'-O-methyl modified nucleotide
  modified_base 12: mod_base = OTHER; note = 2'-fluoro modified nucleotide
  modified_base 13: mod_base = OTHER; note = 2'-O-methyl modified nucleotide
  modified_base 14: mod_base = OTHER; note = 2'-fluoro modified nucleotide with phosphorothioate linkage
  modified_base 15: mod_base = OTHER; note = 2'-O-methyl modified nucleotide with phosphorothioate linkage
  modified_base 16: mod_base = OTHER; note = 2'-fluoro modified nucleotide with phosphorothioate linkage
  modified_base 17: mod_base = OTHER; note = 2'-O-methyl modified nucleotide with phosphorothioate linkage
  modified_base 18: mod_base = OTHER; note = 2'-fluoro modified nucleotide with phosphorothioate linkage
  misc_difference 19: note = 2'-O-methyl modified nucleotide may be attached to trivalent N-Acetylgalactosamine
tcagacattttaacacaga

SEQ ID NO: 757 - RNA, 19 nt, synthetic construct
  source 1..19: mol_type = other RNA
  misc_difference 1: note = 2'-O-methyl modified nucleotide with phosphorothioate linkage may be modified with 5'-Phosphate
  modified_base 2: mod_base = OTHER; note = 2'-fluoro modified nucleotide with phosphorothioate linkage
  modified_base 3: mod_base = OTHER; note = 2'-O-methyl modified nucleotide
  modified_base 4: mod_base = OTHER; note = 2'-fluoro modified nucleotide
  modified_base 5: mod_base = OTHER; note = 2'-O-methyl modified nucleotide
  modified_base 6: mod_base = OTHER; note = 2'-fluoro modified nucleotide
  modified_base 7: mod_base = OTHER; note = 2'-O-methyl modified nucleotide
  modified_base 8: mod_base = OTHER; note = 2'-fluoro modified nucleotide
  modified_base 9: mod_base = OTHER; note = 2'-O-methyl modified nucleotide
  modified_base 10: mod_base = OTHER; note = 2'-fluoro modified nucleotide
  modified_base 11: mod_base = OTHER; note = 2'-O-methyl modified nucleotide
  modified_base 12: mod_base = OTHER; note = 2'-fluoro modified nucleotide
  modified_base 13: mod_base = OTHER; note = 2'-O-methyl modified nucleotide
  modified_base 14: mod_base = OTHER; note = 2'-fluoro modified nucleotide with phosphorothioate linkage
  modified_base 15: mod_base = OTHER; note = 2'-O-methyl modified nucleotide with phosphorothioate linkage
  modified_base 16: mod_base = OTHER; note = 2'-fluoro modified nucleotide with phosphorothioate linkage
  modified_base 17: mod_base = OTHER; note = 2'-O-methyl modified nucleotide with phosphorothioate linkage
  modified_base 18: mod_base = OTHER; note = 2'-fluoro modified nucleotide with phosphorothioate linkage
  misc_difference 19: note = 2'-O-methyl modified nucleotide may be attached to trivalent N-Acetylgalactosamine
tcctggagctggttgccac

SEQ ID NO: 758 - RNA, 19 nt, synthetic construct
  source 1..19: mol_type = other RNA
  misc_difference 1: note = 2'-O-methyl modified nucleotide with phosphorothioate linkage may be modified with 5'-Phosphate
  modified_base 2: mod_base = OTHER; note = 2'-fluoro modified nucleotide with phosphorothioate linkage
  modified_base 3: mod_base = OTHER; note = 2'-O-methyl modified nucleotide
  modified_base 4: mod_base = OTHER; note = 2'-fluoro modified nucleotide
  modified_base 5: mod_base = OTHER; note = 2'-O-methyl modified nucleotide
  modified_base 6: mod_base = OTHER; note = 2'-fluoro modified nucleotide
  modified_base 7: mod_base = OTHER; note = 2'-O-methyl modified nucleotide
  modified_base 8: mod_base = OTHER; note = 2'-fluoro modified nucleotide
  modified_base 9: mod_base = OTHER; note = 2'-O-methyl modified nucleotide
  modified_base 10: mod_base = OTHER; note = 2'-fluoro modified nucleotide
  modified_base 11: mod_base = OTHER; note = 2'-O-methyl modified nucleotide
  modified_base 12: mod_base = OTHER; note = 2'-fluoro modified nucleotide
  modified_base 13: mod_base = OTHER; note = 2'-O-methyl modified nucleotide
  modified_base 14: mod_base = OTHER; note = 2'-fluoro modified nucleotide with phosphorothioate linkage
  modified_base 15: mod_base = OTHER; note = 2'-O-methyl modified nucleotide with phosphorothioate linkage
  modified_base 16: mod_base = OTHER; note = 2'-fluoro modified nucleotide with phosphorothioate linkage
  modified_base 17: mod_base = OTHER; note = 2'-O-methyl modified nucleotide with phosphorothioate linkage
  modified_base 18: mod_base = OTHER; note = 2'-fluoro modified nucleotide with phosphorothioate linkage
  misc_difference 19: note = 2'-O-methyl modified nucleotide may be attached to trivalent N-Acetylgalactosamine
tataaaatcaagtaattat

SEQ ID NO: 759 - RNA, 19 nt, synthetic construct
  source 1..19: mol_type = other RNA
  misc_difference 1: note = 2'-O-methyl modified nucleotide with phosphorothioate linkage may be modified with 5'-Phosphate
  modified_base 2: mod_base = OTHER; note = 2'-fluoro modified nucleotide with phosphorothioate linkage
  modified_base 3: mod_base = OTHER; note = 2'-O-methyl modified nucleotide
  modified_base 4: mod_base = OTHER; note = 2'-fluoro modified nucleotide
  modified_base 5: mod_base = OTHER; note = 2'-O-methyl modified nucleotide
  modified_base 6: mod_base = OTHER; note = 2'-fluoro modified nucleotide
  modified_base 7: mod_base = OTHER; note = 2'-O-methyl modified nucleotide
  modified_base 8: mod_base = OTHER; note = 2'-fluoro modified nucleotide
  modified_base 9: mod_base = OTHER; note = 2'-O-methyl modified nucleotide
  modified_base 10: mod_base = OTHER; note = 2'-fluoro modified nucleotide
  modified_base 11: mod_base = OTHER; note = 2'-O-methyl modified nucleotide
  modified_base 12: mod_base = OTHER; note = 2'-fluoro modified nucleotide
  modified_base 13: mod_base = OTHER; note = 2'-O-methyl modified nucleotide
  modified_base 14: mod_base = OTHER; note = 2'-fluoro modified nucleotide with phosphorothioate linkage
  modified_base 15: mod_base = OTHER; note = 2'-O-methyl modified nucleotide with phosphorothioate linkage
  modified_base 16: mod_base = OTHER; note = 2'-fluoro modified nucleotide with phosphorothioate linkage
  modified_base 17: mod_base = OTHER; note = 2'-O-methyl modified nucleotide with phosphorothioate linkage
  modified_base 18: mod_base = OTHER; note = 2'-fluoro modified nucleotide with phosphorothioate linkage
  misc_difference 19: note = 2'-O-methyl modified nucleotide may be attached to trivalent N-Acetylgalactosamine
tacacagtttggcctggag

SEQ ID NO: 760 - RNA, 19 nt, synthetic construct
  source 1..19: mol_type = other RNA
  misc_difference 1: note = 2'-O-methyl modified nucleotide with phosphorothioate linkage may be modified with 5'-Phosphate
  modified_base 2: mod_base = OTHER; note = 2'-fluoro modified nucleotide with phosphorothioate linkage
  modified_base 3: mod_base = OTHER; note = 2'-O-methyl modified nucleotide
  modified_base 4: mod_base = OTHER; note = 2'-fluoro modified nucleotide
  modified_base 5: mod_base = OTHER; note = 2'-O-methyl modified nucleotide
  modified_base 6: mod_base = OTHER; note = 2'-fluoro modified nucleotide
  modified_base 7: mod_base = OTHER; note = 2'-O-methyl modified nucleotide
  modified_base 8: mod_base = OTHER; note = 2'-fluoro modified nucleotide
  modified_base 9: mod_base = OTHER; note = 2'-O-methyl modified nucleotide
  modified_base 10: mod_base = OTHER; note = 2'-fluoro modified nucleotide
  modified_base 11: mod_base = OTHER; note = 2'-O-methyl modified nucleotide
  modified_base 12: mod_base = OTHER; note = 2'-fluoro modified nucleotide
  modified_base 13: mod_base = OTHER; note = 2'-O-methyl modified nucleotide
  modified_base 14: mod_base = OTHER; note = 2'-fluoro modified nucleotide with phosphorothioate linkage
  modified_base 15: mod_base = OTHER; note = 2'-O-methyl modified nucleotide with phosphorothioate linkage
  modified_base 16: mod_base = OTHER; note = 2'-fluoro modified nucleotide with phosphorothioate linkage
  modified_base 17: mod_base = OTHER; note = 2'-O-methyl modified nucleotide with phosphorothioate linkage
  modified_base 18: mod_base = OTHER; note = 2'-fluoro modified nucleotide with phosphorothioate linkage
  misc_difference 19: note = 2'-O-methyl modified nucleotide may be attached to trivalent N-Acetylgalactosamine
tggaatcttgaagtcagga

SEQ ID NO: 761 - RNA, 19 nt, synthetic construct
  source 1..19: mol_type = other RNA
  misc_difference 1: note = 2'-O-methyl modified nucleotide with phosphorothioate linkage may be modified with 5'-Phosphate
  modified_base 2: mod_base = OTHER; note = 2'-fluoro modified nucleotide with phosphorothioate linkage
  modified_base 3: mod_base = OTHER; note = 2'-O-methyl modified nucleotide
  modified_base 4: mod_base = OTHER; note = 2'-fluoro modified nucleotide
  modified_base 5: mod_base = OTHER; note = 2'-O-methyl modified nucleotide
  modified_base 6: mod_base = OTHER; note = 2'-fluoro modified nucleotide
  modified_base 7: mod_base = OTHER; note = 2'-O-methyl modified nucleotide
  modified_base 8: mod_base = OTHER; note = 2'-fluoro modified nucleotide
  modified_base 9: mod_base = OTHER; note = 2'-O-methyl modified nucleotide
  modified_base 10: mod_base = OTHER; note = 2'-fluoro modified nucleotide
  modified_base 11: mod_base = OTHER; note = 2'-O-methyl modified nucleotide
  modified_base 12: mod_base = OTHER; note = 2'-fluoro modified nucleotide
  modified_base 13: mod_base = OTHER; note = 2'-O-methyl modified nucleotide
  modified_base 14: mod_base = OTHER; note = 2'-fluoro modified nucleotide with phosphorothioate linkage
  modified_base 15: mod_base = OTHER; note = 2'-O-methyl modified nucleotide with phosphorothioate linkage
  modified_base 16: mod_base = OTHER; note = 2'-fluoro modified nucleotide with phosphorothioate linkage
  modified_base 17: mod_base = OTHER; note = 2'-O-methyl modified nucleotide with phosphorothioate linkage
  modified_base 18: mod_base = OTHER; note = 2'-fluoro modified nucleotide with phosphorothioate linkage
  misc_difference 19: note = 2'-O-methyl modified nucleotide may be attached to trivalent N-Acetylgalactosamine
tgacattttaacacagaac

SEQ ID NO: 762 - RNA, 19 nt, synthetic construct
  source 1..19: mol_type = other RNA
  misc_difference 1: note = 2'-O-methyl modified nucleotide with phosphorothioate linkage may be modified with 5'-Phosphate
  modified_base 2: mod_base = OTHER; note = 2'-fluoro modified nucleotide with phosphorothioate linkage
  modified_base 3: mod_base = OTHER; note = 2'-O-methyl modified nucleotide
  modified_base 4: mod_base = OTHER; note = 2'-fluoro modified nucleotide
  modified_base 5: mod_base = OTHER; note = 2'-O-methyl modified nucleotide
  modified_base 6: mod_base = OTHER; note = 2'-fluoro modified nucleotide
  modified_base 7: mod_base = OTHER; note = 2'-O-methyl modified nucleotide
  modified_base 8: mod_base = OTHER; note = 2'-fluoro modified nucleotide
  modified_base 9: mod_base = OTHER; note = 2'-O-methyl modified nucleotide
  modified_base 10: mod_base = OTHER; note = 2'-fluoro modified nucleotide
  modified_base 11: mod_base = OTHER; note = 2'-O-methyl modified nucleotide
  modified_base 12: mod_base = OTHER; note = 2'-fluoro modified nucleotide
  modified_base 13: mod_base = OTHER; note = 2'-O-methyl modified nucleotide
  modified_base 14: mod_base = OTHER; note = 2'-fluoro modified nucleotide with phosphorothioate linkage
  modified_base 15: mod_base = OTHER; note = 2'-O-methyl modified nucleotide with phosphorothioate linkage
  modified_base 16: mod_base = OTHER; note = 2'-fluoro modified nucleotide with phosphorothioate linkage
  modified_base 17: mod_base = OTHER; note = 2'-O-methyl modified nucleotide with phosphorothioate linkage
  modified_base 18: mod_base = OTHER; note = 2'-fluoro modified nucleotide with phosphorothioate linkage
  misc_difference 19: note = 2'-O-methyl modified nucleotide may be attached to trivalent N-Acetylgalactosamine
tgaagtcaggaaaagagat

SEQ ID NO: 763 - RNA, 19 nt, synthetic construct
  source 1..19: mol_type = other RNA
  misc_difference 1: note = 2'-O-methyl modified nucleotide with phosphorothioate linkage may be modified with 5'-Phosphate
  modified_base 2: mod_base = OTHER; note = 2'-fluoro modified nucleotide with phosphorothioate linkage
  modified_base 3: mod_base = OTHER; note = 2'-O-methyl modified nucleotide
  modified_base 4: mod_base = OTHER; note = 2'-fluoro modified nucleotide
  modified_base 5: mod_base = OTHER; note = 2'-O-methyl modified nucleotide
  modified_base 6: mod_base = OTHER; note = 2'-fluoro modified nucleotide
  modified_base 7: mod_base = OTHER; note = 2'-O-methyl modified nucleotide
  modified_base 8: mod_base = OTHER; note = 2'-fluoro modified nucleotide
  modified_base 9: mod_base = OTHER; note = 2'-O-methyl modified nucleotide
  modified_base 10: mod_base = OTHER; note = 2'-fluoro modified nucleotide
  modified_base 11: mod_base = OTHER; note = 2'-O-methyl modified nucleotide
  modified_base 12: mod_base = OTHER; note = 2'-fluoro modified nucleotide
  modified_base 13: mod_base = OTHER; note = 2'-O-methyl modified nucleotide
  modified_base 14: mod_base = OTHER; note = 2'-fluoro modified nucleotide with phosphorothioate linkage
  modified_base 15: mod_base = OTHER; note = 2'-O-methyl modified nucleotide with phosphorothioate linkage
  modified_base 16: mod_base = OTHER; note = 2'-fluoro modified nucleotide with phosphorothioate linkage
  modified_base 17: mod_base = OTHER; note = 2'-O-methyl modified nucleotide with phosphorothioate linkage
  modified_base 18: mod_base = OTHER; note = 2'-fluoro modified nucleotide with phosphorothioate linkage
  misc_difference 19: note = 2'-O-methyl modified nucleotide may be attached to trivalent N-Acetylgalactosamine
tacagtttggcctggagaa

SEQ ID NO: 764 - RNA, 19 nt, synthetic construct
  source 1..19: mol_type = other RNA
  misc_difference 1: note = 2'-O-methyl modified nucleotide with phosphorothioate linkage may be modified with 5'-Phosphate
  modified_base 2: mod_base = OTHER; note = 2'-fluoro modified nucleotide with phosphorothioate linkage
  modified_base 3: mod_base = OTHER; note = 2'-O-methyl modified nucleotide
  modified_base 4: mod_base = OTHER; note = 2'-fluoro modified nucleotide
  modified_base 5: mod_base = OTHER; note = 2'-O-methyl modified nucleotide
  modified_base 6: mod_base = OTHER; note = 2'-fluoro modified nucleotide
  modified_base 7: mod_base = OTHER; note = 2'-O-methyl modified nucleotide
  modified_base 8: mod_base = OTHER; note = 2'-fluoro modified nucleotide
  modified_base 9: mod_base = OTHER; note = 2'-O-methyl modified nucleotide
  modified_base 10: mod_base = OTHER; note = 2'-fluoro modified nucleotide
  modified_base 11: mod_base = OTHER; note = 2'-O-methyl modified nucleotide
  modified_base 12: mod_base = OTHER; note = 2'-fluoro modified nucleotide
  modified_base 13: mod_base = OTHER; note = 2'-O-methyl modified nucleotide
  modified_base 14: mod_base = OTHER; note = 2'-fluoro modified nucleotide with phosphorothioate linkage
  modified_base 15: mod_base = OTHER; note = 2'-O-methyl modified nucleotide with phosphorothioate linkage
  modified_base 16: mod_base = OTHER; note = 2'-fluoro modified nucleotide with phosphorothioate linkage
  modified_base 17: mod_base = OTHER; note = 2'-O-methyl modified nucleotide with phosphorothioate linkage
  modified_base 18: mod_base = OTHER; note = 2'-fluoro modified nucleotide with phosphorothioate linkage
  misc_difference 19: note = 2'-O-methyl modified nucleotide may be attached to trivalent N-Acetylgalactosamine
tattatagtgagttatttt

SEQ ID NO: 765 - RNA, 19 nt, synthetic construct
  source 1..19: mol_type = other RNA
  misc_difference 1: note = 2'-O-methyl modified nucleotide with phosphorothioate linkage may be modified with 5'-Phosphate
  modified_base 2: mod_base = OTHER; note = 2'-fluoro modified nucleotide with phosphorothioate linkage
  modified_base 3: mod_base = OTHER; note = 2'-O-methyl modified nucleotide
  modified_base 4: mod_base = OTHER; note = 2'-fluoro modified nucleotide
  modified_base 5: mod_base = OTHER; note = 2'-O-methyl modified nucleotide
  modified_base 6: mod_base = OTHER; note = 2'-fluoro modified nucleotide
  modified_base 7: mod_base = OTHER; note = 2'-O-methyl modified nucleotide
  modified_base 8: mod_base = OTHER; note = 2'-fluoro modified nucleotide
  modified_base 9: mod_base = OTHER; note = 2'-O-methyl modified nucleotide
  modified_base 10: mod_base = OTHER; note = 2'-fluoro modified nucleotide
  modified_base 11: mod_base = OTHER; note = 2'-O-methyl modified nucleotide
  modified_base 12: mod_base = OTHER; note = 2'-fluoro modified nucleotide
  modified_base 13: mod_base = OTHER; note = 2'-O-methyl modified nucleotide
  modified_base 14: mod_base = OTHER; note = 2'-fluoro modified nucleotide with phosphorothioate linkage
  modified_base 15: mod_base = OTHER; note = 2'-O-methyl modified nucleotide with phosphorothioate linkage
  modified_base 16: mod_base = OTHER; note = 2'-fluoro modified nucleotide with phosphorothioate linkage
  modified_base 17: mod_base = OTHER; note = 2'-O-methyl modified nucleotide with phosphorothioate linkage
  modified_base 18: mod_base = OTHER; note = 2'-fluoro modified nucleotide with phosphorothioate linkage
  misc_difference 19: note = 2'-O-methyl modified nucleotide may be attached to trivalent N-Acetylgalactosamine
tccaagtcagatgtctctt

SEQ ID NO: 766 - RNA, 19 nt, synthetic construct
  source 1..19: mol_type = other RNA
  misc_difference 1: note = 2'-O-methyl modified nucleotide with phosphorothioate linkage may be modified with 5'-Phosphate
  modified_base 2: mod_base = OTHER; note = 2'-fluoro modified nucleotide with phosphorothioate linkage
  modified_base 3: mod_base = OTHER; note = 2'-O-methyl modified nucleotide
  modified_base 4: mod_base = OTHER; note = 2'-fluoro modified nucleotide
  modified_base 5: mod_base = OTHER; note = 2'-O-methyl modified nucleotide
  modified_base 6: mod_base = OTHER; note = 2'-fluoro modified nucleotide
  modified_base 7: mod_base = OTHER; note = 2'-O-methyl modified nucleotide
  modified_base 8: mod_base = OTHER; note = 2'-fluoro modified nucleotide
  modified_base 9: mod_base = OTHER; note = 2'-O-methyl modified nucleotide
  modified_base 10: mod_base = OTHER; note = 2'-fluoro modified nucleotide
  modified_base 11: mod_base = OTHER; note = 2'-O-methyl modified nucleotide
  modified_base 12: mod_base = OTHER; note = 2'-fluoro modified nucleotide
  modified_base 13: mod_base = OTHER; note = 2'-O-methyl modified nucleotide
  modified_base 14: mod_base = OTHER; note = 2'-fluoro modified nucleotide with phosphorothioate linkage
  modified_base 15: mod_base = OTHER; note = 2'-O-methyl modified nucleotide with phosphorothioate linkage
  modified_base 16: mod_base = OTHER; note = 2'-fluoro modified nucleotide with phosphorothioate linkage
  modified_base 17: mod_base = OTHER; note = 2'-O-methyl modified nucleotide with phosphorothioate linkage
  modified_base 18: mod_base = OTHER; note = 2'-fluoro modified nucleotide with phosphorothioate linkage
  misc_difference 19: note = 2'-O-methyl modified nucleotide may be attached to trivalent N-Acetylgalactosamine
tcaggaaaagagataattc

SEQ ID NO: 767 - RNA, 19 nt, synthetic construct
  source 1..19: mol_type = other RNA
  misc_difference 1: note = 2'-O-methyl modified nucleotide with phosphorothioate linkage may be modified with 5'-Phosphate
  modified_base 2: mod_base = OTHER; note = 2'-fluoro modified nucleotide with phosphorothioate linkage
  modified_base 3: mod_base = OTHER; note = 2'-O-methyl modified nucleotide
  modified_base 4: mod_base = OTHER; note = 2'-fluoro modified nucleotide
  modified_base 5: mod_base = OTHER; note = 2'-O-methyl modified nucleotide
  modified_base 6: mod_base = OTHER; note = 2'-fluoro modified nucleotide
  modified_base 7: mod_base = OTHER; note = 2'-O-methyl modified nucleotide
  modified_base 8: mod_base = OTHER; note = 2'-fluoro modified nucleotide
  modified_base 9: mod_base = OTHER; note = 2'-O-methyl modified nucleotide
  modified_base 10: mod_base = OTHER; note = 2'-fluoro modified nucleotide
  modified_base 11: mod_base = OTHER; note = 2'-O-methyl modified nucleotide
  modified_base 12: mod_base = OTHER; note = 2'-fluoro modified nucleotide
  modified_base 13: mod_base = OTHER; note = 2'-O-methyl modified nucleotide
  modified_base 14: mod_base = OTHER; note = 2'-fluoro modified nucleotide with phosphorothioate linkage
  modified_base 15: mod_base = OTHER; note = 2'-O-methyl modified nucleotide with phosphorothioate linkage
  modified_base 16: mod_base = OTHER; note = 2'-fluoro modified nucleotide with phosphorothioate linkage
  modified_base 17: mod_base = OTHER; note = 2'-O-methyl modified nucleotide with phosphorothioate linkage
  modified_base 18: mod_base = OTHER; note = 2'-fluoro modified nucleotide with phosphorothioate linkage
  misc_difference 19: note = 2'-O-methyl modified nucleotide may be attached to trivalent N-Acetylgalactosamine
tgcaagacatattctttaa

SEQ ID NO: 768 - RNA, 19 nt, synthetic construct
  source 1..19: mol_type = other RNA
  misc_difference 1: note = 2'-O-methyl modified nucleotide with phosphorothioate linkage may be modified with 5'-Phosphate
  modified_base 2: mod_base = OTHER; note = 2'-fluoro modified nucleotide with phosphorothioate linkage
  modified_base 3: mod_base = OTHER; note = 2'-O-methyl modified nucleotide
  modified_base 4: mod_base = OTHER; note = 2'-fluoro modified nucleotide
  modified_base 5: mod_base = OTHER; note = 2'-O-methyl modified nucleotide
  modified_base 6: mod_base = OTHER; note = 2'-fluoro modified nucleotide
  modified_base 7: mod_base = OTHER; note = 2'-O-methyl modified nucleotide
  modified_base 8: mod_base = OTHER; note = 2'-fluoro modified nucleotide
  modified_base 9: mod_base = OTHER; note = 2'-O-methyl modified nucleotide
  modified_base 10: mod_base = OTHER; note = 2'-fluoro modified nucleotide
  modified_base 11: mod_base = OTHER; note = 2'-O-methyl modified nucleotide
  modified_base 12: mod_base = OTHER; note = 2'-fluoro modified nucleotide
  modified_base 13: mod_base = OTHER; note = 2'-O-methyl modified nucleotide
  modified_base 14: mod_base = OTHER; note = 2'-fluoro modified nucleotide with phosphorothioate linkage
  modified_base 15: mod_base = OTHER; note = 2'-O-methyl modified nucleotide with phosphorothioate linkage
  modified_base 16: mod_base = OTHER; note = 2'-fluoro modified nucleotide with phosphorothioate linkage
  modified_base 17: mod_base = OTHER; note = 2'-O-methyl modified nucleotide with phosphorothioate linkage
  modified_base 18: mod_base = OTHER; note = 2'-fluoro modified nucleotide with phosphorothioate linkage
  misc_difference 19: note = 2'-O-methyl modified nucleotide may be attached to trivalent N-Acetylgalactosamine
taaggccaatttccagagg

SEQ ID NO: 769 - RNA, 19 nt, synthetic construct
  source 1..19: mol_type = other RNA
  misc_difference 1: note = 2'-O-methyl modified nucleotide with phosphorothioate linkage may be modified with 5'-Phosphate
  modified_base 2: mod_base = OTHER; note = 2'-fluoro modified nucleotide with phosphorothioate linkage
  modified_base 3: mod_base = OTHER; note = 2'-O-methyl modified nucleotide
  modified_base 4: mod_base = OTHER; note = 2'-fluoro modified nucleotide
  modified_base 5: mod_base = OTHER; note = 2'-O-methyl modified nucleotide
  modified_base 6: mod_base = OTHER; note = 2'-fluoro modified nucleotide
  modified_base 7: mod_base = OTHER; note = 2'-O-methyl modified nucleotide
  modified_base 8: mod_base = OTHER; note = 2'-fluoro modified nucleotide
  modified_base 9: mod_base = OTHER; note = 2'-O-methyl modified nucleotide
  modified_base 10: mod_base = OTHER; note = 2'-fluoro modified nucleotide
  modified_base 11: mod_base = OTHER; note = 2'-O-methyl modified nucleotide
  modified_base 12: mod_base = OTHER; note = 2'-fluoro modified nucleotide
  modified_base 13: mod_base = OTHER; note = 2'-O-methyl modified nucleotide
  modified_base 14: mod_base = OTHER; note = 2'-fluoro modified nucleotide with phosphorothioate linkage
  modified_base 15: mod_base = OTHER; note = 2'-O-methyl modified nucleotide with phosphorothioate linkage
  modified_base 16: mod_base = OTHER; note = 2'-fluoro modified nucleotide with phosphorothioate linkage
  modified_base 17: mod_base = OTHER; note = 2'-O-methyl modified nucleotide with phosphorothioate linkage
  modified_base 18: mod_base = OTHER; note = 2'-fluoro modified nucleotide with phosphorothioate linkage
  misc_difference 19: note = 2'-O-methyl modified nucleotide may be attached to trivalent N-Acetylgalactosamine
taagtaattatagtgagtt

SEQ ID NO: 770 - RNA, 19 nt, synthetic construct
  source 1..19: mol_type = other RNA
  misc_difference 1: note = 2'-O-methyl modified nucleotide with phosphorothioate linkage may be modified with 5'-Phosphate
  modified_base 2: mod_base = OTHER; note = 2'-fluoro modified nucleotide with phosphorothioate linkage
  modified_base 3: mod_base = OTHER; note = 2'-O-methyl modified nucleotide
  modified_base 4: mod_base = OTHER; note = 2'-fluoro modified nucleotide
  modified_base 5: mod_base = OTHER; note = 2'-O-methyl modified nucleotide
  modified_base 6: mod_base = OTHER; note = 2'-fluoro modified nucleotide
  modified_base 7: mod_base = OTHER; note = 2'-O-methyl modified nucleotide
  modified_base 8: mod_base = OTHER; note = 2'-fluoro modified nucleotide
  modified_base 9: mod_base = OTHER; note = 2'-O-methyl modified nucleotide
  modified_base 10: mod_base = OTHER; note = 2'-fluoro modified nucleotide
  modified_base 11: mod_base = OTHER; note = 2'-O-methyl modified nucleotide
  modified_base 12: mod_base = OTHER; note = 2'-fluoro modified nucleotide
  modified_base 13: mod_base = OTHER; note = 2'-O-methyl modified nucleotide
  modified_base 14: mod_base = OTHER; note = 2'-fluoro modified nucleotide with phosphorothioate linkage
  modified_base 15: mod_base = OTHER; note = 2'-O-methyl modified nucleotide with phosphorothioate linkage
  modified_base 16: mod_base = OTHER; note = 2'-fluoro modified nucleotide with phosphorothioate linkage
  modified_base 17: mod_base = OTHER; note = 2'-O-methyl modified nucleotide with phosphorothioate linkage
  modified_base 18: mod_base = OTHER; note = 2'-fluoro modified nucleotide with phosphorothioate linkage
  misc_difference 19: note = 2'-O-methyl modified nucleotide may be attached to trivalent N-Acetylgalactosamine
ttaaaatcaagtaattata

SEQ ID NO: 771 - RNA, 19 nt, synthetic construct
  source 1..19: mol_type = other RNA
  misc_difference 1: note = 2'-O-methyl modified nucleotide with phosphorothioate linkage may be modified with 5'-Phosphate
  modified_base 2: mod_base = OTHER; note = 2'-fluoro modified nucleotide with phosphorothioate linkage
  modified_base 3: mod_base = OTHER; note = 2'-O-methyl modified nucleotide
  modified_base 4: mod_base = OTHER; note = 2'-fluoro modified nucleotide
  modified_base 5: mod_base = OTHER; note = 2'-O-methyl modified nucleotide
  modified_base 6: mod_base = OTHER; note = 2'-fluoro modified nucleotide
  modified_base 7: mod_base = OTHER; note = 2'-O-methyl modified nucleotide
  modified_base 8: mod_base = OTHER; note = 2'-fluoro modified nucleotide
  modified_base 9: mod_base = OTHER; note = 2'-O-methyl modified nucleotide
  modified_base 10: mod_base = OTHER; note = 2'-fluoro modified nucleotide
  modified_base 11: mod_base = OTHER; note = 2'-O-methyl modified nucleotide
  modified_base 12: mod_base = OTHER; note = 2'-fluoro modified nucleotide
  modified_base 13: mod_base = OTHER; note = 2'-O-methyl modified nucleotide
  modified_base 14: mod_base = OTHER; note = 2'-fluoro modified nucleotide with phosphorothioate linkage
  modified_base 15: mod_base = OTHER; note = 2'-O-methyl modified nucleotide with phosphorothioate linkage
  modified_base 16: mod_base = OTHER; note = 2'-fluoro modified nucleotide with phosphorothioate linkage
  modified_base 17: mod_base = OTHER; note = 2'-O-methyl modified nucleotide with phosphorothioate linkage
  modified_base 18: mod_base = OTHER; note = 2'-fluoro modified nucleotide with phosphorothioate linkage
  misc_difference 19: note = 2'-O-methyl modified nucleotide may be attached to trivalent N-Acetylgalactosamine
ttcaagtaattatagtgag

SEQ ID NO: 772 - RNA, 19 nt, synthetic construct
  source 1..19: mol_type = other RNA
  misc_difference 1: note = 2'-O-methyl modified nucleotide with phosphorothioate linkage may be modified with 5'-Phosphate
  modified_base 2: mod_base = OTHER; note = 2'-fluoro modified nucleotide with phosphorothioate linkage
  modified_base 3: mod_base = OTHER; note = 2'-O-methyl modified nucleotide
  modified_base 4: mod_base = OTHER; note = 2'-fluoro modified nucleotide
  modified_base 5: mod_base = OTHER; note = 2'-O-methyl modified nucleotide
  modified_base 6: mod_base = OTHER; note = 2'-fluoro modified nucleotide
  modified_base 7: mod_base = OTHER; note = 2'-O-methyl modified nucleotide
  modified_base 8: mod_base = OTHER; note = 2'-fluoro modified nucleotide
  modified_base 9: mod_base = OTHER; note = 2'-O-methyl modified nucleotide
  modified_base 10: mod_base = OTHER; note = 2'-fluoro modified nucleotide
  modified_base 11: mod_base = OTHER; note = 2'-O-methyl modified nucleotide
  modified_base 12: mod_base = OTHER; note = 2'-fluoro modified nucleotide
  modified_base 13: mod_base = OTHER; note = 2'-O-methyl modified nucleotide
  modified_base 14: mod_base = OTHER; note = 2'-fluoro modified nucleotide with phosphorothioate linkage
  modified_base 15: mod_base = OTHER; note = 2'-O-methyl modified nucleotide with phosphorothioate linkage
  modified_base 16: mod_base = OTHER; note = 2'-fluoro modified nucleotide with phosphorothioate linkage
  modified_base 17: mod_base = OTHER; note = 2'-O-methyl modified nucleotide with phosphorothioate linkage
  modified_base 18: mod_base = OTHER; note = 2'-fluoro modified nucleotide with phosphorothioate linkage
  misc_difference 19: note = 2'-O-methyl modified nucleotide may be attached to trivalent N-Acetylgalactosamine
tccaatttccagaggaagc

SEQ ID NO: 773 - RNA, 19 nt, synthetic construct
  source 1..19: mol_type = other RNA
  misc_difference 1: note = 2'-O-methyl modified nucleotide with phosphorothioate linkage may be modified with 5'-Phosphate
  modified_base 2: mod_base = OTHER; note = 2'-fluoro modified nucleotide with phosphorothioate linkage
  modified_base 3: mod_base = OTHER; note = 2'-O-methyl modified nucleotide
  modified_base 4: mod_base = OTHER; note = 2'-fluoro modified nucleotide
  modified_base 5: mod_base = OTHER; note = 2'-O-methyl modified nucleotide
  modified_base 6: mod_base = OTHER; note = 2'-fluoro modified nucleotide
  modified_base 7: mod_base = OTHER; note = 2'-O-methyl modified nucleotide
  modified_base 8: mod_base = OTHER; note = 2'-fluoro modified nucleotide
  modified_base 9: mod_base = OTHER; note = 2'-O-methyl modified nucleotide
  modified_base 10: mod_base = OTHER; note = 2'-fluoro modified nucleotide
  modified_base 11: mod_base = OTHER; note = 2'-O-methyl modified nucleotide
  modified_base 12: mod_base = OTHER; note = 2'-fluoro modified nucleotide
  modified_base 13: mod_base = OTHER; note = 2'-O-methyl modified nucleotide
  modified_base 14: mod_base = OTHER; note = 2'-fluoro modified nucleotide with phosphorothioate linkage
  modified_base 15: mod_base = OTHER; note = 2'-O-methyl modified nucleotide with phosphorothioate linkage
  modified_base 16: mod_base = OTHER; note = 2'-fluoro modified nucleotide with phosphorothioate linkage
  modified_base 17: mod_base = OTHER; note = 2'-O-methyl modified nucleotide with phosphorothioate linkage
  modified_base 18: mod_base = OTHER; note = 2'-fluoro modified nucleotide with phosphorothioate linkage
  misc_difference 19: note = 2'-O-methyl modified nucleotide may be attached to trivalent N-Acetylgalactosamine
tgtaattatagtgagttat

SEQ ID NO: 774 - RNA, 19 nt, synthetic construct
  source 1..19: mol_type = other RNA
  misc_difference 1: note = 2'-O-methyl modified nucleotide with phosphorothioate linkage may be modified with 5'-Phosphate
  modified_base 2: mod_base = OTHER; note = 2'-fluoro modified nucleotide with phosphorothioate linkage
  modified_base 3: mod_base = OTHER; note = 2'-O-methyl modified nucleotide
  modified_base 4: mod_base = OTHER; note = 2'-fluoro modified nucleotide
  modified_base 5: mod_base = OTHER; note = 2'-O-methyl modified nucleotide
  modified_base 6: mod_base = OTHER; note = 2'-fluoro modified nucleotide
  modified_base 7: mod_base = OTHER; note = 2'-O-methyl modified nucleotide
  modified_base 8: mod_base = OTHER; note = 2'-fluoro modified nucleotide
  modified_base 9: mod_base = OTHER; note = 2'-O-methyl modified nucleotide
  modified_base 10: mod_base = OTHER; note = 2'-fluoro modified nucleotide
  modified_base 11: mod_base = OTHER; note = 2'-O-methyl modified nucleotide
  modified_base 12: mod_base = OTHER; note = 2'-fluoro modified nucleotide
  modified_base 13: mod_base = OTHER; note = 2'-O-methyl modified nucleotide
  modified_base 14: mod_base = OTHER; note = 2'-fluoro modified nucleotide with phosphorothioate linkage
  modified_base 15: mod_base = OTHER; note = 2'-O-methyl modified nucleotide with phosphorothioate linkage
  modified_base 16: mod_base = OTHER; note = 2'-fluoro modified nucleotide with phosphorothioate linkage
  modified_base 17: mod_base = OTHER; note = 2'-O-methyl modified nucleotide with phosphorothioate linkage
  modified_base 18: mod_base = OTHER; note = 2'-fluoro modified nucleotide with phosphorothioate linkage
  misc_difference 19: note = 2'-O-methyl modified nucleotide may be attached to trivalent N-Acetylgalactosamine
taaaggtacttgttgttta

SEQ ID NO: 775 - RNA, 19 nt, synthetic construct
  source 1..19: mol_type = other RNA
  misc_difference 1: note = 2'-O-methyl modified nucleotide with phosphorothioate linkage may be modified with 5'-Phosphate
  modified_base 2: mod_base = OTHER; note = 2'-fluoro modified nucleotide with phosphorothioate linkage
  modified_base 3: mod_base = OTHER; note = 2'-O-methyl modified nucleotide
  modified_base 4: mod_base = OTHER; note = 2'-fluoro modified nucleotide
  modified_base 5: mod_base = OTHER; note = 2'-O-methyl modified nucleotide
  modified_base 6: mod_base = OTHER; note = 2'-fluoro modified nucleotide
  modified_base 7: mod_base = OTHER; note = 2'-O-methyl modified nucleotide
  modified_base 8: mod_base = OTHER; note = 2'-fluoro modified nucleotide
  modified_base 9: mod_base = OTHER; note = 2'-O-methyl modified nucleotide
  modified_base 10: mod_base = OTHER; note = 2'-fluoro modified nucleotide
  modified_base 11: mod_base = OTHER; note = 2'-O-methyl modified nucleotide
  modified_base 12: mod_base = OTHER; note = 2'-fluoro modified nucleotide
  modified_base 13: mod_base = OTHER; note = 2'-O-methyl modified nucleotide
  modified_base 14: mod_base = OTHER; note = 2'-fluoro modified nucleotide with phosphorothioate linkage
  modified_base 15: mod_base = OTHER; note = 2'-O-methyl modified nucleotide with phosphorothioate linkage
  modified_base 16: mod_base = OTHER; note = 2'-fluoro modified nucleotide with phosphorothioate linkage
  modified_base 17: mod_base = OTHER; note = 2'-O-methyl modified nucleotide with phosphorothioate linkage
  modified_base 18: mod_base = OTHER; note = 2'-fluoro modified nucleotide with phosphorothioate linkage
  misc_difference 19: note = 2'-O-methyl modified nucleotide may be attached to trivalent N-Acetylgalactosamine
tactgctgtttcagaatca

SEQ ID NO: 776 - RNA, 19 nt, synthetic construct
  source 1..19: mol_type = other RNA
  misc_difference 1: note = 2'-O-methyl modified nucleotide with phosphorothioate linkage may be modified with 5'-Phosphate
  modified_base 2: mod_base = OTHER; note = 2'-fluoro modified nucleotide with phosphorothioate linkage
  modified_base 3: mod_base = OTHER; note = 2'-O-methyl modified nucleotide
  modified_base 4: mod_base = OTHER; note = 2'-fluoro modified nucleotide
  modified_base 5: mod_base = OTHER; note = 2'-O-methyl modified nucleotide
  modified_base 6: mod_base = OTHER; note = 2'-fluoro modified nucleotide
  modified_base 7: mod_base = OTHER; note = 2'-O-methyl modified nucleotide
  modified_base 8: mod_base = OTHER; note = 2'-fluoro modified nucleotide
  modified_base 9: mod_base = OTHER; note = 2'-O-methyl modified nucleotide
  modified_base 10: mod_base = OTHER; note = 2'-fluoro modified nucleotide
  modified_base 11: mod_base = OTHER; note = 2'-O-methyl modified nucleotide
  modified_base 12: mod_base = OTHER; note = 2'-fluoro modified nucleotide
  modified_base 13: mod_base = OTHER; note = 2'-O-methyl modified nucleotide
  modified_base 14: mod_base = OTHER; note = 2'-fluoro modified nucleotide with phosphorothioate linkage
  modified_base 15: mod_base = OTHER; note = 2'-O-methyl modified nucleotide with phosphorothioate linkage
  modified_base 16: mod_base = OTHER; note = 2'-fluoro modified nucleotide with phosphorothioate linkage
  modified_base 17: mod_base = OTHER; note = 2'-O-methyl modified nucleotide with phosphorothioate linkage
  modified_base 18: mod_base = OTHER; note = 2'-fluoro modified nucleotide with phosphorothioate linkage
  misc_difference 19: note = 2'-O-methyl modified nucleotide may be attached to trivalent N-Acetylgalactosamine
tctgctgtttcagaatcaa

SEQ ID NO: 777 - RNA, 19 nt, synthetic construct
  source 1..19: mol_type = other RNA
  misc_difference 1: note = 2'-O-methyl modified nucleotide with phosphorothioate linkage may be modified with 5'-Phosphate
  modified_base 2: mod_base = OTHER; note = 2'-fluoro modified nucleotide with phosphorothioate linkage
  modified_base 3: mod_base = OTHER; note = 2'-O-methyl modified nucleotide
  modified_base 4: mod_base = OTHER; note = 2'-fluoro modified nucleotide
  modified_base 5: mod_base = OTHER; note = 2'-O-methyl modified nucleotide
  modified_base 6: mod_base = OTHER; note = 2'-fluoro modified nucleotide
  modified_base 7: mod_base = OTHER; note = 2'-O-methyl modified nucleotide
  modified_base 8: mod_base = OTHER; note = 2'-fluoro modified nucleotide
  modified_base 9: mod_base = OTHER; note = 2'-O-methyl modified nucleotide
  modified_base 10: mod_base = OTHER; note = 2'-fluoro modified nucleotide
  modified_base 11: mod_base = OTHER; note = 2'-O-methyl modified nucleotide
  modified_base 12: mod_base = OTHER; note = 2'-fluoro modified nucleotide
  modified_base 13: mod_base = OTHER; note = 2'-O-methyl modified nucleotide
  modified_base 14: mod_base = OTHER; note = 2'-fluoro modified nucleotide with phosphorothioate linkage
  modified_base 15: mod_base = OTHER; note = 2'-O-methyl modified nucleotide with phosphorothioate linkage
  modified_base 16: mod_base = OTHER; note = 2'-fluoro modified nucleotide with phosphorothioate linkage
  modified_base 17: mod_base = OTHER; note = 2'-O-methyl modified nucleotide with phosphorothioate linkage
  modified_base 18: mod_base = OTHER; note = 2'-fluoro modified nucleotide with phosphorothioate linkage
  misc_difference 19: note = 2'-O-methyl modified nucleotide may be attached to trivalent N-Acetylgalactosamine
ttataaaggtacttgttgt

SEQ ID NO: 778 - RNA, 19 nt, synthetic construct
  source 1..19: mol_type = other RNA
  misc_difference 1: note = 2'-O-methyl modified nucleotide with phosphorothioate linkage may be modified with 5'-Phosphate
  modified_base 2: mod_base = OTHER; note = 2'-fluoro modified nucleotide with phosphorothioate linkage
  modified_base 3: mod_base = OTHER; note = 2'-O-methyl modified nucleotide
  modified_base 4: mod_base = OTHER; note = 2'-fluoro modified nucleotide
  modified_base 5: mod_base = OTHER; note = 2'-O-methyl modified nucleotide
  modified_base 6: mod_base = OTHER; note = 2'-fluoro modified nucleotide
  modified_base 7: mod_base = OTHER; note = 2'-O-methyl modified nucleotide
  modified_base 8: mod_base = OTHER; note = 2'-fluoro modified nucleotide
  modified_base 9: mod_base = OTHER; note = 2'-O-methyl modified nucleotide
  modified_base 10: mod_base = OTHER; note = 2'-fluoro modified nucleotide
  modified_base 11: mod_base = OTHER; note = 2'-O-methyl modified nucleotide
  modified_base 12: mod_base = OTHER; note = 2'-fluoro modified nucleotide
  modified_base 13: mod_base = OTHER; note = 2'-O-methyl modified nucleotide
  modified_base 14: mod_base = OTHER; note = 2'-fluoro modified nucleotide with phosphorothioate linkage
  modified_base 15: mod_base = OTHER; note = 2'-O-methyl modified nucleotide with phosphorothioate linkage
  modified_base 16: mod_base = OTHER; note = 2'-fluoro modified nucleotide with phosphorothioate linkage
  modified_base 17: mod_base = OTHER; note = 2'-O-methyl modified nucleotide with phosphorothioate linkage
  modified_base 18: mod_base = OTHER; note = 2'-fluoro modified nucleotide with phosphorothioate linkage
  misc_difference 19: note = 2'-O-methyl modified nucleotide may be attached to trivalent N-Acetylgalactosamine
tgtaaacagttcctttcaa

SEQ ID NO: 779 - RNA, 19 nt, synthetic construct
  source 1..19: mol_type = other RNA
  misc_difference 1: note = 2'-O-methyl modified nucleotide with phosphorothioate linkage may be modified with 5'-Phosphate
  modified_base 2: mod_base = OTHER; note = 2'-fluoro modified nucleotide with phosphorothioate linkage
  modified_base 3: mod_base = OTHER; note = 2'-O-methyl modified nucleotide
  modified_base 4: mod_base = OTHER; note = 2'-fluoro modified nucleotide
  modified_base 5: mod_base = OTHER; note = 2'-O-methyl modified nucleotide
  modified_base 6: mod_base = OTHER; note = 2'-fluoro modified nucleotide
  modified_base 7: mod_base = OTHER; note = 2'-O-methyl modified nucleotide
  modified_base 8: mod_base = OTHER; note = 2'-fluoro modified nucleotide
  modified_base 9: mod_base = OTHER; note = 2'-O-methyl modified nucleotide
  modified_base 10: mod_base = OTHER; note = 2'-fluoro modified nucleotide
  modified_base 11: mod_base = OTHER; note = 2'-O-methyl modified nucleotide
  modified_base 12: mod_base = OTHER; note = 2'-fluoro modified nucleotide
  modified_base 13: mod_base = OTHER; note = 2'-O-methyl modified nucleotide
  modified_base 14: mod_base = OTHER; note = 2'-fluoro modified nucleotide with phosphorothioate linkage
  modified_base 15: mod_base = OTHER; note = 2'-O-methyl modified nucleotide with phosphorothioate linkage
  modified_base 16: mod_base = OTHER; note = 2'-fluoro modified nucleotide with phosphorothioate linkage
  modified_base 17: mod_base = OTHER; note = 2'-O-methyl modified nucleotide with phosphorothioate linkage
  modified_base 18: mod_base = OTHER; note = 2'-fluoro modified nucleotide with phosphorothioate linkage
  misc_difference 19: note = 2'-O-methyl modified nucleotide may be attached to trivalent N-Acetylgalactosamine
tgtaactttggctgagaga

SEQ ID NO: 780 - RNA, 19 nt, synthetic construct
  source 1..19: mol_type = other RNA
  misc_difference 1: note = 2'-O-methyl modified nucleotide with phosphorothioate linkage may be modified with 5'-Phosphate
  modified_base 2: mod_base = OTHER; note = 2'-fluoro modified nucleotide with phosphorothioate linkage
  modified_base 3: mod_base = OTHER; note = 2'-O-methyl modified nucleotide
  modified_base 4: mod_base = OTHER; note = 2'-fluoro modified nucleotide
  modified_base 5: mod_base = OTHER; note = 2'-O-methyl modified nucleotide
  modified_base 6: mod_base = OTHER; note = 2'-fluoro modified nucleotide
  modified_base 7: mod_base = OTHER; note = 2'-O-methyl modified nucleotide
  modified_base 8: mod_base = OTHER; note = 2'-fluoro modified nucleotide
  modified_base 9: mod_base = OTHER; note = 2'-O-methyl modified nucleotide
  modified_base 10: mod_base = OTHER; note = 2'-fluoro modified nucleotide
  modified_base 11: mod_base = OTHER; note = 2'-O-methyl modified nucleotide
  modified_base 12: mod_base = OTHER; note = 2'-fluoro modified nucleotide
  modified_base 13: mod_base = OTHER; note = 2'-O-methyl modified nucleotide
  modified_base 14: mod_base = OTHER; note = 2'-fluoro modified nucleotide with phosphorothioate linkage
  modified_base 15: mod_base = OTHER; note = 2'-O-methyl modified nucleotide with phosphorothioate linkage
  modified_base 16: mod_base = OTHER; note = 2'-fluoro modified nucleotide with phosphorothioate linkage
  modified_base 17: mod_base = OTHER; note = 2'-O-methyl modified nucleotide with phosphorothioate linkage
  modified_base 18: mod_base = OTHER; note = 2'-fluoro modified nucleotide with phosphorothioate linkage
  misc_difference 19: note = 2'-O-methyl modified nucleotide may be attached to trivalent N-Acetylgalactosamine
tatagttgtaaacagttcc

SEQ ID NO: 781 - RNA, 19 nt, synthetic construct
  source 1..19: mol_type = other RNA
  misc_difference 1: note = 2'-O-methyl modified nucleotide with phosphorothioate linkage may be modified with 5'-Phosphate
  modified_base 2: mod_base = OTHER; note = 2'-fluoro modified nucleotide with phosphorothioate linkage
  modified_base 3: mod_base = OTHER; note = 2'-O-methyl modified nucleotide
  modified_base 4: mod_base = OTHER; note = 2'-fluoro modified nucleotide
  modified_base 5: mod_base = OTHER; note = 2'-O-methyl modified nucleotide
  modified_base 6: mod_base = OTHER; note = 2'-fluoro modified nucleotide
  modified_base 7: mod_base = OTHER; note = 2'-O-methyl modified nucleotide
  modified_base 8: mod_base = OTHER; note = 2'-fluoro modified nucleotide
  modified_base 9: mod_base = OTHER; note = 2'-O-methyl modified nucleotide
  modified_base 10: mod_base = OTHER; note = 2'-fluoro modified nucleotide
  modified_base 11: mod_base = OTHER; note = 2'-O-methyl modified nucleotide
  modified_base 12: mod_base = OTHER; note = 2'-fluoro modified nucleotide
  modified_base 13: mod_base = OTHER; note = 2'-O-methyl modified nucleotide
  modified_base 14: mod_base = OTHER; note = 2'-fluoro modified nucleotide with phosphorothioate linkage
  modified_base 15: mod_base = OTHER; note = 2'-O-methyl modified nucleotide with phosphorothioate linkage
  modified_base 16: mod_base = OTHER; note = 2'-fluoro modified nucleotide with phosphorothioate linkage
  modified_base 17: mod_base = OTHER; note = 2'-O-methyl modified nucleotide with phosphorothioate linkage
  modified_base 18: mod_base = OTHER; note = 2'-fluoro modified nucleotide with phosphorothioate linkage
  misc_difference 19: note = 2'-O-methyl modified nucleotide may be attached to trivalent N-Acetylgalactosamine
tcatattctttaacttcaa

SEQ ID NO: 782 - RNA, 19 nt, synthetic construct
  source 1..19: mol_type = other RNA
  misc_difference 1: note = 2'-O-methyl modified nucleotide with phosphorothioate linkage may be modified with 5'-Phosphate
  modified_base 2: mod_base = OTHER; note = 2'-fluoro modified nucleotide with phosphorothioate linkage
  modified_base 3: mod_base = OTHER; note = 2'-O-methyl modified nucleotide
  modified_base 4: mod_base = OTHER; note = 2'-fluoro modified nucleotide
  modified_base 5: mod_base = OTHER; note = 2'-O-methyl modified nucleotide
  modified_base 6: mod_base = OTHER; note = 2'-fluoro modified nucleotide
  modified_base 7: mod_base = OTHER; note = 2'-O-methyl modified nucleotide
  modified_base 8: mod_base = OTHER; note = 2'-fluoro modified nucleotide
  modified_base 9: mod_base = OTHER; note = 2'-O-methyl modified nucleotide
  modified_base 10: mod_base = OTHER; note = 2'-fluoro modified nucleotide
  modified_base 11: mod_base = OTHER; note = 2'-O-methyl modified nucleotide
  modified_base 12: mod_base = OTHER; note = 2'-fluoro modified nucleotide
  modified_base 13: mod_base = OTHER; note = 2'-O-methyl modified nucleotide
  modified_base 14: mod_base = OTHER; note = 2'-fluoro modified nucleotide with phosphorothioate linkage
  modified_base 15: mod_base = OTHER; note = 2'-O-methyl modified nucleotide with phosphorothioate linkage
  modified_base 16: mod_base = OTHER; note = 2'-fluoro modified nucleotide with phosphorothioate linkage
  modified_base 17: mod_base = OTHER; note = 2'-O-methyl modified nucleotide with phosphorothioate linkage
  modified_base 18: mod_base = OTHER; note = 2'-fluoro modified nucleotide with phosphorothioate linkage
  misc_difference 19: note = 2'-O-methyl modified nucleotide may be attached to trivalent N-Acetylgalactosamine
tagcagtccttttacactc

SEQ ID NO: 783 - RNA, 19 nt, synthetic construct
  source 1..19: mol_type = other RNA
  misc_difference 1: note = 2'-O-methyl modified nucleotide with phosphorothioate linkage may be modified with 5'-Phosphate
  modified_base 2: mod_base = OTHER; note = 2'-fluoro modified nucleotide with phosphorothioate linkage
  modified_base 3: mod_base = OTHER; note = 2'-O-methyl modified nucleotide
  modified_base 4: mod_base = OTHER; note = 2'-fluoro modified nucleotide
  modified_base 5: mod_base = OTHER; note = 2'-O-methyl modified nucleotide
  modified_base 6: mod_base = OTHER; note = 2'-fluoro modified nucleotide
  modified_base 7: mod_base = OTHER; note = 2'-O-methyl modified nucleotide
  modified_base 8: mod_base = OTHER; note = 2'-fluoro modified nucleotide
  modified_base 9: mod_base = OTHER; note = 2'-O-methyl modified nucleotide
  modified_base 10: mod_base = OTHER; note = 2'-fluoro modified nucleotide
  modified_base 11: mod_base = OTHER; note = 2'-O-methyl modified nucleotide
  modified_base 12: mod_base = OTHER; note = 2'-fluoro modified nucleotide
  modified_base 13: mod_base = OTHER; note = 2'-O-methyl modified nucleotide
  modified_base 14: mod_base = OTHER; note = 2'-fluoro modified nucleotide with phosphorothioate linkage
  modified_base 15: mod_base = OTHER; note = 2'-O-methyl modified nucleotide with phosphorothioate linkage
  modified_base 16: mod_base = OTHER; note = 2'-fluoro modified nucleotide with phosphorothioate linkage
  modified_base 17: mod_base = OTHER; note = 2'-O-methyl modified nucleotide with phosphorothioate linkage
  modified_base 18: mod_base = OTHER; note = 2'-fluoro modified nucleotide with phosphorothioate linkage
  misc_difference 19: note = 2'-O-methyl modified nucleotide may be attached to trivalent N-Acetylgalactosamine
tagtgagttattttgtcaa

SEQ ID NO: 784 - RNA, 19 nt, synthetic construct
  source 1..19: mol_type = other RNA
  misc_difference 1: note = 2'-O-methyl modified nucleotide with phosphorothioate linkage may be modified with 5'-Phosphate
  modified_base 2: mod_base = OTHER; note = 2'-fluoro modified nucleotide with phosphorothioate linkage
  modified_base 3: mod_base = OTHER; note = 2'-O-methyl modified nucleotide
  modified_base 4: mod_base = OTHER; note = 2'-fluoro modified nucleotide
  modified_base 5: mod_base = OTHER; note = 2'-O-methyl modified nucleotide
  modified_base 6: mod_base = OTHER; note = 2'-fluoro modified nucleotide
  modified_base 7: mod_base = OTHER; note = 2'-O-methyl modified nucleotide
  modified_base 8: mod_base = OTHER; note = 2'-fluoro modified nucleotide
  modified_base 9: mod_base = OTHER; note = 2'-O-methyl modified nucleotide
  modified_base 10: mod_base = OTHER; note = 2'-fluoro modified nucleotide
  modified_base 11: mod_base = OTHER; note = 2'-O-methyl modified nucleotide
  modified_base 12: mod_base = OTHER; note = 2'-fluoro modified nucleotide
  modified_base 13: mod_base = OTHER; note = 2'-O-methyl modified nucleotide
  modified_base 14: mod_base = OTHER; note = 2'-fluoro modified nucleotide with phosphorothioate linkage
  modified_base 15: mod_base = OTHER; note = 2'-O-methyl modified nucleotide with phosphorothioate linkage
  modified_base 16: mod_base = OTHER; note = 2'-fluoro modified nucleotide with phosphorothioate linkage
  modified_base 17: mod_base = OTHER; note = 2'-O-methyl modified nucleotide with phosphorothioate linkage
  modified_base 18: mod_base = OTHER; note = 2'-fluoro modified nucleotide with phosphorothioate linkage
  misc_difference 19: note = 2'-O-methyl modified nucleotide may be attached to trivalent N-Acetylgalactosamine
tggaagacatctttgaaca

SEQ ID NO: 785 - RNA, 19 nt, synthetic construct
  source 1..19: mol_type = other RNA
  misc_difference 1: note = 2'-O-methyl modified nucleotide with phosphorothioate linkage may be modified with 5'-Phosphate
  modified_base 2: mod_base = OTHER; note = 2'-fluoro modified nucleotide with phosphorothioate linkage
  modified_base 3: mod_base = OTHER; note = 2'-O-methyl modified nucleotide
  modified_base 4: mod_base = OTHER; note = 2'-fluoro modified nucleotide
  modified_base 5: mod_base = OTHER; note = 2'-O-methyl modified nucleotide
  modified_base 6: mod_base = OTHER; note = 2'-fluoro modified nucleotide
  modified_base 7: mod_base = OTHER; note = 2'-O-methyl modified nucleotide
  modified_base 8: mod_base = OTHER; note = 2'-fluoro modified nucleotide
  modified_base 9: mod_base = OTHER; note = 2'-O-methyl modified nucleotide
  modified_base 10: mod_base = OTHER; note = 2'-fluoro modified nucleotide
  modified_base 11: mod_base = OTHER; note = 2'-O-methyl modified nucleotide
  modified_base 12: mod_base = OTHER; note = 2'-fluoro modified nucleotide
  modified_base 13: mod_base = OTHER; note = 2'-O-methyl modified nucleotide
  modified_base 14: mod_base = OTHER; note = 2'-fluoro modified nucleotide with phosphorothioate linkage
  modified_base 15: mod_base = OTHER; note = 2'-O-methyl modified nucleotide with phosphorothioate linkage
  modified_base 16: mod_base = OTHER; note = 2'-fluoro modified nucleotide with phosphorothioate linkage
  modified_base 17: mod_base = OTHER; note = 2'-O-methyl modified nucleotide with phosphorothioate linkage
  modified_base 18: mod_base = OTHER; note = 2'-fluoro modified nucleotide with phosphorothioate linkage
  misc_difference 19: note = 2'-O-methyl modified nucleotide may be attached to trivalent N-Acetylgalactosamine
tcagtccttttacactcaa

SEQ ID NO: 786 - RNA, 19 nt, synthetic construct
  source 1..19: mol_type = other RNA
  misc_difference 1: note = 2'-O-methyl modified nucleotide with phosphorothioate linkage may be modified with 5'-Phosphate
  modified_base 2: mod_base = OTHER; note = 2'-fluoro modified nucleotide with phosphorothioate linkage
  modified_base 3: mod_base = OTHER; note = 2'-O-methyl modified nucleotide
  modified_base 4: mod_base = OTHER; note = 2'-fluoro modified nucleotide
  modified_base 5: mod_base = OTHER; note = 2'-O-methyl modified nucleotide
  modified_base 6: mod_base = OTHER; note = 2'-fluoro modified nucleotide
  modified_base 7: mod_base = OTHER; note = 2'-O-methyl modified nucleotide
  modified_base 8: mod_base = OTHER; note = 2'-fluoro modified nucleotide
  modified_base 9: mod_base = OTHER; note = 2'-O-methyl modified nucleotide
  modified_base 10: mod_base = OTHER; note = 2'-fluoro modified nucleotide
  modified_base 11: mod_base = OTHER; note = 2'-O-methyl modified nucleotide
  modified_base 12: mod_base = OTHER; note = 2'-fluoro modified nucleotide
  modified_base 13: mod_base = OTHER; note = 2'-O-methyl modified nucleotide
  modified_base 14: mod_base = OTHER; note = 2'-fluoro modified nucleotide with phosphorothioate linkage
  modified_base 15: mod_base = OTHER; note = 2'-O-methyl modified nucleotide with phosphorothioate linkage
  modified_base 16: mod_base = OTHER; note = 2'-fluoro modified nucleotide with phosphorothioate linkage
  modified_base 17: mod_base = OTHER; note = 2'-O-methyl modified nucleotide with phosphorothioate linkage
  modified_base 18: mod_base = OTHER; note = 2'-fluoro modified nucleotide with phosphorothioate linkage
  misc_difference 19: note = 2'-O-methyl modified nucleotide may be attached to trivalent N-Acetylgalactosamine
tgttattttgtcaatatat

SEQ ID NO: 787 - RNA, 19 nt, synthetic construct
  source 1..19: mol_type = other RNA
  misc_difference 1: note = 2'-O-methyl modified nucleotide with phosphorothioate linkage may be modified with 5'-Phosphate
  modified_base 2: mod_base = OTHER; note = 2'-fluoro modified nucleotide with phosphorothioate linkage
  modified_base 3: mod_base = OTHER; note = 2'-O-methyl modified nucleotide
  modified_base 4: mod_base = OTHER; note = 2'-fluoro modified nucleotide
  modified_base 5: mod_base = OTHER; note = 2'-O-methyl modified nucleotide
  modified_base 6: mod_base = OTHER; note = 2'-fluoro modified nucleotide
  modified_base 7: mod_base = OTHER; note = 2'-O-methyl modified nucleotide
  modified_base 8: mod_base = OTHER; note = 2'-fluoro modified nucleotide
  modified_base 9: mod_base = OTHER; note = 2'-O-methyl modified nucleotide
  modified_base 10: mod_base = OTHER; note = 2'-fluoro modified nucleotide
  modified_base 11: mod_base = OTHER; note = 2'-O-methyl modified nucleotide
  modified_base 12: mod_base = OTHER; note = 2'-fluoro modified nucleotide
  modified_base 13: mod_base = OTHER; note = 2'-O-methyl modified nucleotide
  modified_base 14: mod_base = OTHER; note = 2'-fluoro modified nucleotide with phosphorothioate linkage
  modified_base 15: mod_base = OTHER; note = 2'-O-methyl modified nucleotide with phosphorothioate linkage
  modified_base 16: mod_base = OTHER; note = 2'-fluoro modified nucleotide with phosphorothioate linkage
  modified_base 17: mod_base = OTHER; note = 2'-O-methyl modified nucleotide with phosphorothioate linkage
  modified_base 18: mod_base = OTHER; note = 2'-fluoro modified nucleotide with phosphorothioate linkage
  misc_difference 19: note = 2'-O-methyl modified nucleotide may be attached to trivalent N-Acetylgalactosamine
ttacaacagaatatggtat

SEQ ID NO: 788 - RNA, 19 nt, synthetic construct
  source 1..19: mol_type = other RNA
  misc_difference 1: note = 2'-O-methyl modified nucleotide with phosphorothioate linkage may be modified with 5'-Phosphate
  modified_base 2: mod_base = OTHER; note = 2'-fluoro modified nucleotide with phosphorothioate linkage
  modified_base 3: mod_base = OTHER; note = 2'-O-methyl modified nucleotide
  modified_base 4: mod_base = OTHER; note = 2'-fluoro modified nucleotide
  modified_base 5: mod_base = OTHER; note = 2'-O-methyl modified nucleotide
  modified_base 6: mod_base = OTHER; note = 2'-fluoro modified nucleotide
  modified_base 7: mod_base = OTHER; note = 2'-O-methyl modified nucleotide
  modified_base 8: mod_base = OTHER; note = 2'-fluoro modified nucleotide
  modified_base 9: mod_base = OTHER; note = 2'-O-methyl modified nucleotide
  modified_base 10: mod_base = OTHER; note = 2'-fluoro modified nucleotide
  modified_base 11: mod_base = OTHER; note = 2'-O-methyl modified nucleotide
  modified_base 12: mod_base = OTHER; note = 2'-fluoro modified nucleotide
  modified_base 13: mod_base = OTHER; note = 2'-O-methyl modified nucleotide
  modified_base 14: mod_base = OTHER; note = 2'-fluoro modified nucleotide with phosphorothioate linkage
  modified_base 15: mod_base = OTHER; note = 2'-O-methyl modified nucleotide with phosphorothioate linkage
  modified_base 16: mod_base = OTHER; note = 2'-fluoro modified nucleotide with phosphorothioate linkage
  modified_base 17: mod_base = OTHER; note = 2'-O-methyl modified nucleotide with phosphorothioate linkage
  modified_base 18: mod_base = OTHER; note = 2'-fluoro modified nucleotide with phosphorothioate linkage
  misc_difference 19: note = 2'-O-methyl modified nucleotide may be attached to trivalent N-Acetylgalactosamine
tttattttgtcaatatatg

SEQ ID NO: 789 - RNA, 19 nt, synthetic construct
  source 1..19: mol_type = other RNA
  misc_difference 1: note = 2'-O-methyl modified nucleotide with phosphorothioate linkage may be modified with 5'-Phosphate
  modified_base 2: mod_base = OTHER; note = 2'-fluoro modified nucleotide with phosphorothioate linkage
  modified_base 3: mod_base = OTHER; note = 2'-O-methyl modified nucleotide
  modified_base 4: mod_base = OTHER; note = 2'-fluoro modified nucleotide
  modified_base 5: mod_base = OTHER; note = 2'-O-methyl modified nucleotide
  modified_base 6: mod_base = OTHER; note = 2'-fluoro modified nucleotide
  modified_base 7: mod_base = OTHER; note = 2'-O-methyl modified nucleotide
  modified_base 8: mod_base = OTHER; note = 2'-fluoro modified nucleotide
  modified_base 9: mod_base = OTHER; note = 2'-O-methyl modified nucleotide
  modified_base 10: mod_base = OTHER; note = 2'-fluoro modified nucleotide
  modified_base 11: mod_base = OTHER; note = 2'-O-methyl modified nucleotide
  modified_base 12: mod_base = OTHER; note = 2'-fluoro modified nucleotide
  modified_base 13: mod_base = OTHER; note = 2'-O-methyl modified nucleotide
  modified_base 14: mod_base = OTHER; note = 2'-fluoro modified nucleotide with phosphorothioate linkage
  modified_base 15: mod_base = OTHER; note = 2'-O-methyl modified nucleotide with phosphorothioate linkage
  modified_base 16: mod_base = OTHER; note = 2'-fluoro modified nucleotide with phosphorothioate linkage
  modified_base 17: mod_base = OTHER; note = 2'-O-methyl modified nucleotide with phosphorothioate linkage
  modified_base 18: mod_base = OTHER; note = 2'-fluoro modified nucleotide with phosphorothioate linkage
  misc_difference 19: note = 2'-O-methyl modified nucleotide may be attached to trivalent N-Acetylgalactosamine
taggcttcaggaaaagagg

SEQ ID NO: 790 - RNA, 19 nt, synthetic construct
  source 1..19: mol_type = other RNA
  misc_difference 1: note = 2'-O-methyl modified nucleotide with phosphorothioate linkage may be modified with 5'-Phosphate
  modified_base 2: mod_base = OTHER; note = 2'-fluoro modified nucleotide with phosphorothioate linkage
  modified_base 3: mod_base = OTHER; note = 2'-O-methyl modified nucleotide
  modified_base 4: mod_base = OTHER; note = 2'-fluoro modified nucleotide
  modified_base 5: mod_base = OTHER; note = 2'-O-methyl modified nucleotide
  modified_base 6: mod_base = OTHER; note = 2'-fluoro modified nucleotide
  modified_base 7: mod_base = OTHER; note = 2'-O-methyl modified nucleotide
  modified_base 8: mod_base = OTHER; note = 2'-fluoro modified nucleotide
  modified_base 9: mod_base = OTHER; note = 2'-O-methyl modified nucleotide
  modified_base 10: mod_base = OTHER; note = 2'-fluoro modified nucleotide
  modified_base 11: mod_base = OTHER; note = 2'-O-methyl modified nucleotide
  modified_base 12: mod_base = OTHER; note = 2'-fluoro modified nucleotide
  modified_base 13: mod_base = OTHER; note = 2'-O-methyl modified nucleotide
  modified_base 14: mod_base = OTHER; note = 2'-fluoro modified nucleotide with phosphorothioate linkage
  modified_base 15: mod_base = OTHER; note = 2'-O-methyl modified nucleotide with phosphorothioate linkage
  modified_base 16: mod_base = OTHER; note = 2'-fluoro modified nucleotide with phosphorothioate linkage
  modified_base 17: mod_base = OTHER; note = 2'-O-methyl modified nucleotide with phosphorothioate linkage
  modified_base 18: mod_base = OTHER; note = 2'-fluoro modified nucleotide with phosphorothioate linkage
  misc_difference 19: note = 2'-O-methyl modified nucleotide may be attached to trivalent N-Acetylgalactosamine
tggaaaagagataattcca

SEQ ID NO: 791 - RNA, 19 nt, synthetic construct
  source 1..19: mol_type = other RNA
  misc_difference 1: note = 2'-O-methyl modified nucleotide with phosphorothioate linkage may be modified with 5'-Phosphate
  modified_base 2: mod_base = OTHER; note = 2'-fluoro modified nucleotide with phosphorothioate linkage
  modified_base 3: mod_base = OTHER; note = 2'-O-methyl modified nucleotide
  modified_base 4: mod_base = OTHER; note = 2'-fluoro modified nucleotide
  modified_base 5: mod_base = OTHER; note = 2'-O-methyl modified nucleotide
  modified_base 6: mod_base = OTHER; note = 2'-fluoro modified nucleotide
  modified_base 7: mod_base = OTHER; note = 2'-O-methyl modified nucleotide
  modified_base 8: mod_base = OTHER; note = 2'-fluoro modified nucleotide
  modified_base 9: mod_base = OTHER; note = 2'-O-methyl modified nucleotide
  modified_base 10: mod_base = OTHER; note = 2'-fluoro modified nucleotide
  modified_base 11: mod_base = OTHER; note = 2'-O-methyl modified nucleotide
  modified_base 12: mod_base = OTHER; note = 2'-fluoro modified nucleotide
  modified_base 13: mod_base = OTHER; note = 2'-O-methyl modified nucleotide
  modified_base 14: mod_base = OTHER; note = 2'-fluoro modified nucleotide with phosphorothioate linkage
  modified_base 15: mod_base = OTHER; note = 2'-O-methyl modified nucleotide with phosphorothioate linkage
  modified_base 16: mod_base = OTHER; note = 2'-fluoro modified nucleotide with phosphorothioate linkage
  modified_base 17: mod_base = OTHER; note = 2'-O-methyl modified nucleotide with phosphorothioate linkage
  modified_base 18: mod_base = OTHER; note = 2'-fluoro modified nucleotide with phosphorothioate linkage
  misc_difference 19: note = 2'-O-methyl modified nucleotide may be attached to trivalent N-Acetylgalactosamine
tgttacagcaatataaagg

SEQ ID NO: 792 - RNA, 19 nt, synthetic construct
  source 1..19: mol_type = other RNA
  misc_difference 1: note = 2'-O-methyl modified nucleotide with phosphorothioate linkage may be modified with 5'-Phosphate
  modified_base 2: mod_base = OTHER; note = 2'-fluoro modified nucleotide with phosphorothioate linkage
  modified_base 3: mod_base = OTHER; note = 2'-O-methyl modified nucleotide
  modified_base 4: mod_base = OTHER; note = 2'-fluoro modified nucleotide
  modified_base 5: mod_base = OTHER; note = 2'-O-methyl modified nucleotide
  modified_base 6: mod_base = OTHER; note = 2'-fluoro modified nucleotide
  modified_base 7: mod_base = OTHER; note = 2'-O-methyl modified nucleotide
  modified_base 8: mod_base = OTHER; note = 2'-fluoro modified nucleotide
  modified_base 9: mod_base = OTHER; note = 2'-O-methyl modified nucleotide
  modified_base 10: mod_base = OTHER; note = 2'-fluoro modified nucleotide
  modified_base 11: mod_base = OTHER; note = 2'-O-methyl modified nucleotide
  modified_base 12: mod_base = OTHER; note = 2'-fluoro modified nucleotide
  modified_base 13: mod_base = OTHER; note = 2'-O-methyl modified nucleotide
  modified_base 14: mod_base = OTHER; note = 2'-fluoro modified nucleotide with phosphorothioate linkage
  modified_base 15: mod_base = OTHER; note = 2'-O-methyl modified nucleotide with phosphorothioate linkage
  modified_base 16: mod_base = OTHER; note = 2'-fluoro modified nucleotide with phosphorothioate linkage
  modified_base 17: mod_base = OTHER; note = 2'-O-methyl modified nucleotide with phosphorothioate linkage
  modified_base 18: mod_base = OTHER; note = 2'-fluoro modified nucleotide with phosphorothioate linkage
  misc_difference 19: note = 2'-O-methyl modified nucleotide may be attached to trivalent N-Acetylgalactosamine
tataagcatatgcaatctc

SEQ ID NO: 793 - RNA, 19 nt, synthetic construct
  source 1..19: mol_type = other RNA
  misc_difference 1: note = 2'-O-methyl modified nucleotide with phosphorothioate linkage may be modified with 5'-Phosphate
  modified_base 2: mod_base = OTHER; note = 2'-fluoro modified nucleotide with phosphorothioate linkage
  modified_base 3: mod_base = OTHER; note = 2'-O-methyl modified nucleotide
  modified_base 4: mod_base = OTHER; note = 2'-fluoro modified nucleotide
  modified_base 5: mod_base = OTHER; note = 2'-O-methyl modified nucleotide
  modified_base 6: mod_base = OTHER; note = 2'-fluoro modified nucleotide
  modified_base 7: mod_base = OTHER; note = 2'-O-methyl modified nucleotide
  modified_base 8: mod_base = OTHER; note = 2'-fluoro modified nucleotide
  modified_base 9: mod_base = OTHER; note = 2'-O-methyl modified nucleotide
  modified_base 10: mod_base = OTHER; note = 2'-fluoro modified nucleotide
  modified_base 11: mod_base = OTHER; note = 2'-O-methyl modified nucleotide
  modified_base 12: mod_base = OTHER; note = 2'-fluoro modified nucleotide
  modified_base 13: mod_base = OTHER; note = 2'-O-methyl modified nucleotide
  modified_base 14: mod_base = OTHER; note = 2'-fluoro modified nucleotide with phosphorothioate linkage
  modified_base 15: mod_base = OTHER; note = 2'-O-methyl modified nucleotide with phosphorothioate linkage
  modified_base 16: mod_base = OTHER; note = 2'-fluoro modified nucleotide with phosphorothioate linkage
  modified_base 17: mod_base = OTHER; note = 2'-O-methyl modified nucleotide with phosphorothioate linkage
  modified_base 18: mod_base = OTHER; note = 2'-fluoro modified nucleotide with phosphorothioate linkage
  misc_difference 19: note = 2'-O-methyl modified nucleotide may be attached to trivalent N-Acetylgalactosamine
tatattctttaacttcaaa

SEQ ID NO: 794 - RNA, 19 nt, synthetic construct
  source 1..19: mol_type = other RNA
  misc_difference 1: note = 2'-O-methyl modified nucleotide with phosphorothioate linkage may be modified with 5'-Phosphate
  modified_base 2: mod_base = OTHER; note = 2'-fluoro modified nucleotide with phosphorothioate linkage
  modified_base 3: mod_base = OTHER; note = 2'-O-methyl modified nucleotide
  modified_base 4: mod_base = OTHER; note = 2'-fluoro modified nucleotide
  modified_base 5: mod_base = OTHER; note = 2'-O-methyl modified nucleotide
  modified_base 6: mod_base = OTHER; note = 2'-fluoro modified nucleotide
  modified_base 7: mod_base = OTHER; note = 2'-O-methyl modified nucleotide
  modified_base 8: mod_base = OTHER; note = 2'-fluoro modified nucleotide
  modified_base 9: mod_base = OTHER; note = 2'-O-methyl modified nucleotide
  modified_base 10: mod_base = OTHER; note = 2'-fluoro modified nucleotide
  modified_base 11: mod_base = OTHER; note = 2'-O-methyl modified nucleotide
  modified_base 12: mod_base = OTHER; note = 2'-fluoro modified nucleotide
  modified_base 13: mod_base = OTHER; note = 2'-O-methyl modified nucleotide
  modified_base 14: mod_base = OTHER; note = 2'-fluoro modified nucleotide with phosphorothioate linkage
  modified_base 15: mod_base = OTHER; note = 2'-O-methyl modified nucleotide with phosphorothioate linkage
  modified_base 16: mod_base = OTHER; note = 2'-fluoro modified nucleotide with phosphorothioate linkage
  modified_base 17: mod_base = OTHER; note = 2'-O-methyl modified nucleotide with phosphorothioate linkage
  modified_base 18: mod_base = OTHER; note = 2'-fluoro modified nucleotide with phosphorothioate linkage
  misc_difference 19: note = 2'-O-methyl modified nucleotide may be attached to trivalent N-Acetylgalactosamine
tagacatctttgaacacct

SEQ ID NO: 795 - RNA, 19 nt, synthetic construct
  source 1..19: mol_type = other RNA
  misc_difference 1: note = 2'-O-methyl modified nucleotide with phosphorothioate linkage may be modified with 5'-Phosphate
  modified_base 2: mod_base = OTHER; note = 2'-fluoro modified nucleotide with phosphorothioate linkage
  modified_base 3: mod_base = OTHER; note = 2'-O-methyl modified nucleotide
  modified_base 4: mod_base = OTHER; note = 2'-fluoro modified nucleotide
  modified_base 5: mod_base = OTHER; note = 2'-O-methyl modified nucleotide
  modified_base 6: mod_base = OTHER; note = 2'-fluoro modified nucleotide
  modified_base 7: mod_base = OTHER; note = 2'-O-methyl modified nucleotide
  modified_base 8: mod_base = OTHER; note = 2'-fluoro modified nucleotide
  modified_base 9: mod_base = OTHER; note = 2'-O-methyl modified nucleotide
  modified_base 10: mod_base = OTHER; note = 2'-fluoro modified nucleotide
  modified_base 11: mod_base = OTHER; note = 2'-O-methyl modified nucleotide
  modified_base 12: mod_base = OTHER; note = 2'-fluoro modified nucleotide
  modified_base 13: mod_base = OTHER; note = 2'-O-methyl modified nucleotide
  modified_base 14: mod_base = OTHER; note = 2'-fluoro modified nucleotide with phosphorothioate linkage
  modified_base 15: mod_base = OTHER; note = 2'-O-methyl modified nucleotide with phosphorothioate linkage
  modified_base 16: mod_base = OTHER; note = 2'-fluoro modified nucleotide with phosphorothioate linkage
  modified_base 17: mod_base = OTHER; note = 2'-O-methyl modified nucleotide with phosphorothioate linkage
  modified_base 18: mod_base = OTHER; note = 2'-fluoro modified nucleotide with phosphorothioate linkage
  misc_difference 19: note = 2'-O-methyl modified nucleotide may be attached to trivalent N-Acetylgalactosamine
tcaggaagacatctttgaa

SEQ ID NO: 796 - RNA, 19 nt, synthetic construct
  source 1..19: mol_type = other RNA
  misc_difference 1: note = 2'-O-methyl modified nucleotide with phosphorothioate linkage may be modified with 5'-Phosphate
  modified_base 2: mod_base = OTHER; note = 2'-fluoro modified nucleotide with phosphorothioate linkage
  modified_base 3: mod_base = OTHER; note = 2'-O-methyl modified nucleotide
  modified_base 4: mod_base = OTHER; note = 2'-fluoro modified nucleotide
  modified_base 5: mod_base = OTHER; note = 2'-O-methyl modified nucleotide
  modified_base 6: mod_base = OTHER; note = 2'-fluoro modified nucleotide
  modified_base 7: mod_base = OTHER; note = 2'-O-methyl modified nucleotide
  modified_base 8: mod_base = OTHER; note = 2'-fluoro modified nucleotide
  modified_base 9: mod_base = OTHER; note = 2'-O-methyl modified nucleotide
  modified_base 10: mod_base = OTHER; note = 2'-fluoro modified nucleotide
  modified_base 11: mod_base = OTHER; note = 2'-O-methyl modified nucleotide
  modified_base 12: mod_base = OTHER; note = 2'-fluoro modified nucleotide
  modified_base 13: mod_base = OTHER; note = 2'-O-methyl modified nucleotide
  modified_base 14: mod_base = OTHER; note = 2'-fluoro modified nucleotide with phosphorothioate linkage
  modified_base 15: mod_base = OTHER; note = 2'-O-methyl modified nucleotide with phosphorothioate linkage
  modified_base 16: mod_base = OTHER; note = 2'-fluoro modified nucleotide with phosphorothioate linkage
  modified_base 17: mod_base = OTHER; note = 2'-O-methyl modified nucleotide with phosphorothioate linkage
  modified_base 18: mod_base = OTHER; note = 2'-fluoro modified nucleotide with phosphorothioate linkage
  misc_difference 19: note = 2'-O-methyl modified nucleotide may be attached to trivalent N-Acetylgalactosamine
tacagcaatataaaggtac

SEQ ID NO: 797 - RNA, 19 nt, synthetic construct
  source 1..19: mol_type = other RNA
  misc_difference 1: note = 2'-O-methyl modified nucleotide with phosphorothioate linkage may be modified with 5'-Phosphate
  modified_base 2: mod_base = OTHER; note = 2'-fluoro modified nucleotide with phosphorothioate linkage
  modified_base 3: mod_base = OTHER; note = 2'-O-methyl modified nucleotide
  modified_base 4: mod_base = OTHER; note = 2'-fluoro modified nucleotide
  modified_base 5: mod_base = OTHER; note = 2'-O-methyl modified nucleotide
  modified_base 6: mod_base = OTHER; note = 2'-fluoro modified nucleotide
  modified_base 7: mod_base = OTHER; note = 2'-O-methyl modified nucleotide
  modified_base 8: mod_base = OTHER; note = 2'-fluoro modified nucleotide
  modified_base 9: mod_base = OTHER; note = 2'-O-methyl modified nucleotide
  modified_base 10: mod_base = OTHER; note = 2'-fluoro modified nucleotide
  modified_base 11: mod_base = OTHER; note = 2'-O-methyl modified nucleotide
  modified_base 12: mod_base = OTHER; note = 2'-fluoro modified nucleotide
  modified_base 13: mod_base = OTHER; note = 2'-O-methyl modified nucleotide
  modified_base 14: mod_base = OTHER; note = 2'-fluoro modified nucleotide with phosphorothioate linkage
  modified_base 15: mod_base = OTHER; note = 2'-O-methyl modified nucleotide with phosphorothioate linkage
  modified_base 16: mod_base = OTHER; note = 2'-fluoro modified nucleotide with phosphorothioate linkage
  modified_base 17: mod_base = OTHER; note = 2'-O-methyl modified nucleotide with phosphorothioate linkage
  modified_base 18: mod_base = OTHER; note = 2'-fluoro modified nucleotide with phosphorothioate linkage
  misc_difference 19: note = 2'-O-methyl modified nucleotide may be attached to trivalent N-Acetylgalactosamine
tattgtcataggttattgg

SEQ ID NO: 798 - RNA, 19 nt, synthetic construct
  source 1..19: mol_type = other RNA
  misc_difference 1: note = 2'-O-methyl modified nucleotide with phosphorothioate linkage may be modified with 5'-Phosphate
  modified_base 2: mod_base = OTHER; note = 2'-fluoro modified nucleotide with phosphorothioate linkage
  modified_base 3: mod_base = OTHER; note = 2'-O-methyl modified nucleotide
  modified_base 4: mod_base = OTHER; note = 2'-fluoro modified nucleotide
  modified_base 5: mod_base = OTHER; note = 2'-O-methyl modified nucleotide
  modified_base 6: mod_base = OTHER; note = 2'-fluoro modified nucleotide
  modified_base 7: mod_base = OTHER; note = 2'-O-methyl modified nucleotide
  modified_base 8: mod_base = OTHER; note = 2'-fluoro modified nucleotide
  modified_base 9: mod_base = OTHER; note = 2'-O-methyl modified nucleotide
  modified_base 10: mod_base = OTHER; note = 2'-fluoro modified nucleotide
  modified_base 11: mod_base = OTHER; note = 2'-O-methyl modified nucleotide
  modified_base 12: mod_base = OTHER; note = 2'-fluoro modified nucleotide
  modified_base 13: mod_base = OTHER; note = 2'-O-methyl modified nucleotide
  modified_base 14: mod_base = OTHER; note = 2'-fluoro modified nucleotide with phosphorothioate linkage
  modified_base 15: mod_base = OTHER; note = 2'-O-methyl modified nucleotide with phosphorothioate linkage
  modified_base 16: mod_base = OTHER; note = 2'-fluoro modified nucleotide with phosphorothioate linkage
  modified_base 17: mod_base = OTHER; note = 2'-O-methyl modified nucleotide with phosphorothioate linkage
  modified_base 18: mod_base = OTHER; note = 2'-fluoro modified nucleotide with phosphorothioate linkage
  misc_difference 19: note = 2'-O-methyl modified nucleotide may be attached to trivalent N-Acetylgalactosamine
tgagttattttgtcaatat

SEQ ID NO: 799 - RNA, 19 nt, synthetic construct
  source 1..19: mol_type = other RNA
  misc_difference 1: note = 2'-O-methyl modified nucleotide with phosphorothioate linkage may be modified with 5'-Phosphate
  modified_base 2: mod_base = OTHER; note = 2'-fluoro modified nucleotide with phosphorothioate linkage
  modified_base 3: mod_base = OTHER; note = 2'-O-methyl modified nucleotide
  modified_base 4: mod_base = OTHER; note = 2'-fluoro modified nucleotide
  modified_base 5: mod_base = OTHER; note = 2'-O-methyl modified nucleotide
  modified_base 6: mod_base = OTHER; note = 2'-fluoro modified nucleotide
  modified_base 7: mod_base = OTHER; note = 2'-O-methyl modified nucleotide
  modified_base 8: mod_base = OTHER; note = 2'-fluoro modified nucleotide
  modified_base 9: mod_base = OTHER; note = 2'-O-methyl modified nucleotide
  modified_base 10: mod_base = OTHER; note = 2'-fluoro modified nucleotide
  modified_base 11: mod_base = OTHER; note = 2'-O-methyl modified nucleotide
  modified_base 12: mod_base = OTHER; note = 2'-fluoro modified nucleotide
  modified_base 13: mod_base = OTHER; note = 2'-O-methyl modified nucleotide
  modified_base 14: mod_base = OTHER; note = 2'-fluoro modified nucleotide with phosphorothioate linkage
  modified_base 15: mod_base = OTHER; note = 2'-O-methyl modified nucleotide with phosphorothioate linkage
  modified_base 16: mod_base = OTHER; note = 2'-fluoro modified nucleotide with phosphorothioate linkage
  modified_base 17: mod_base = OTHER; note = 2'-O-methyl modified nucleotide with phosphorothioate linkage
  modified_base 18: mod_base = OTHER; note = 2'-fluoro modified nucleotide with phosphorothioate linkage
  misc_difference 19: note = 2'-O-methyl modified nucleotide may be attached to trivalent N-Acetylgalactosamine
tgtgagttattttgtcaat

SEQ ID NO: 800 - RNA, 19 nt, synthetic construct
  source 1..19: mol_type = other RNA
  misc_difference 1: note = 2'-O-methyl modified nucleotide with phosphorothioate linkage may be modified with 5'-Phosphate
  modified_base 2: mod_base = OTHER; note = 2'-fluoro modified nucleotide with phosphorothioate linkage
  modified_base 3: mod_base = OTHER; note = 2'-O-methyl modified nucleotide
  modified_base 4: mod_base = OTHER; note = 2'-fluoro modified nucleotide
  modified_base 5: mod_base = OTHER; note = 2'-O-methyl modified nucleotide
  modified_base 6: mod_base = OTHER; note = 2'-fluoro modified nucleotide
  modified_base 7: mod_base = OTHER; note = 2'-O-methyl modified nucleotide
  modified_base 8: mod_base = OTHER; note = 2'-fluoro modified nucleotide
  modified_base 9: mod_base = OTHER; note = 2'-O-methyl modified nucleotide
  modified_base 10: mod_base = OTHER; note = 2'-fluoro modified nucleotide
  modified_base 11: mod_base = OTHER; note = 2'-O-methyl modified nucleotide
  modified_base 12: mod_base = OTHER; note = 2'-fluoro modified nucleotide
  modified_base 13: mod_base = OTHER; note = 2'-O-methyl modified nucleotide
  modified_base 14: mod_base = OTHER; note = 2'-fluoro modified nucleotide with phosphorothioate linkage
  modified_base 15: mod_base = OTHER; note = 2'-O-methyl modified nucleotide with phosphorothioate linkage
  modified_base 16: mod_base = OTHER; note = 2'-fluoro modified nucleotide with phosphorothioate linkage
  modified_base 17: mod_base = OTHER; note = 2'-O-methyl modified nucleotide with phosphorothioate linkage
  modified_base 18: mod_base = OTHER; note = 2'-fluoro modified nucleotide with phosphorothioate linkage
  misc_difference 19: note = 2'-O-methyl modified nucleotide may be attached to trivalent N-Acetylgalactosamine
ttgagttattttgtcaata

SEQ ID NO: 801 - RNA, 19 nt, synthetic construct
  source 1..19: mol_type = other RNA
  misc_difference 1: note = 2'-O-methyl modified nucleotide with phosphorothioate linkage may be modified with 5'-Phosphate
  modified_base 2: mod_base = OTHER; note = 2'-fluoro modified nucleotide with phosphorothioate linkage
  modified_base 3: mod_base = OTHER; note = 2'-O-methyl modified nucleotide
  modified_base 4: mod_base = OTHER; note = 2'-fluoro modified nucleotide
  modified_base 5: mod_base = OTHER; note = 2'-O-methyl modified nucleotide
  modified_base 6: mod_base = OTHER; note = 2'-fluoro modified nucleotide
  modified_base 7: mod_base = OTHER; note = 2'-O-methyl modified nucleotide
  modified_base 8: mod_base = OTHER; note = 2'-fluoro modified nucleotide
  modified_base 9: mod_base = OTHER; note = 2'-O-methyl modified nucleotide
  modified_base 10: mod_base = OTHER; note = 2'-fluoro modified nucleotide
  modified_base 11: mod_base = OTHER; note = 2'-O-methyl modified nucleotide
  modified_base 12: mod_base = OTHER; note = 2'-fluoro modified nucleotide
  modified_base 13: mod_base = OTHER; note = 2'-O-methyl modified nucleotide
  modified_base 14: mod_base = OTHER; note = 2'-fluoro modified nucleotide with phosphorothioate linkage
  modified_base 15: mod_base = OTHER; note = 2'-O-methyl modified nucleotide with phosphorothioate linkage
  modified_base 16: mod_base = OTHER; note = 2'-fluoro modified nucleotide with phosphorothioate linkage
  modified_base 17: mod_base = OTHER; note = 2'-O-methyl modified nucleotide with phosphorothioate linkage
  modified_base 18: mod_base = OTHER; note = 2'-fluoro modified nucleotide with phosphorothioate linkage
  misc_difference 19: note = 2'-O-methyl modified nucleotide may be attached to trivalent N-Acetylgalactosamine
taattttccttgaaagatc

SEQ ID NO: 802 - RNA, 19 nt, synthetic construct
  source 1..19: mol_type = other RNA
  misc_difference 1: note = 2'-O-methyl modified nucleotide with phosphorothioate linkage may be modified with 5'-Phosphate
  modified_base 2: mod_base = OTHER; note = 2'-fluoro modified nucleotide with phosphorothioate linkage
  modified_base 3: mod_base = OTHER; note = 2'-O-methyl modified nucleotide
  modified_base 4: mod_base = OTHER; note = 2'-fluoro modified nucleotide
  modified_base 5: mod_base = OTHER; note = 2'-O-methyl modified nucleotide
  modified_base 6: mod_base = OTHER; note = 2'-fluoro modified nucleotide
  modified_base 7: mod_base = OTHER; note = 2'-O-methyl modified nucleotide
  modified_base 8: mod_base = OTHER; note = 2'-fluoro modified nucleotide
  modified_base 9: mod_base = OTHER; note = 2'-O-methyl modified nucleotide
  modified_base 10: mod_base = OTHER; note = 2'-fluoro modified nucleotide
  modified_base 11: mod_base = OTHER; note = 2'-O-methyl modified nucleotide
  modified_base 12: mod_base = OTHER; note = 2'-fluoro modified nucleotide
  modified_base 13: mod_base = OTHER; note = 2'-O-methyl modified nucleotide
  modified_base 14: mod_base = OTHER; note = 2'-fluoro modified nucleotide with phosphorothioate linkage
  modified_base 15: mod_base = OTHER; note = 2'-O-methyl modified nucleotide with phosphorothioate linkage
  modified_base 16: mod_base = OTHER; note = 2'-fluoro modified nucleotide with phosphorothioate linkage
  modified_base 17: mod_base = OTHER; note = 2'-O-methyl modified nucleotide with phosphorothioate linkage
  modified_base 18: mod_base = OTHER; note = 2'-fluoro modified nucleotide with phosphorothioate linkage
  misc_difference 19: note = 2'-O-methyl modified nucleotide may be attached to trivalent N-Acetylgalactosamine
tctgttacagcaatataaa

SEQ ID NO: 803 - RNA, 19 nt, synthetic construct
  source 1..19: mol_type = other RNA
  misc_difference 1: note = 2'-O-methyl modified nucleotide with phosphorothioate linkage may be modified with 5'-Phosphate
  modified_base 2: mod_base = OTHER; note = 2'-fluoro modified nucleotide with phosphorothioate linkage
  modified_base 3: mod_base = OTHER; note = 2'-O-methyl modified nucleotide
  modified_base 4: mod_base = OTHER; note = 2'-fluoro modified nucleotide
  modified_base 5: mod_base = OTHER; note = 2'-O-methyl modified nucleotide
  modified_base 6: mod_base = OTHER; note = 2'-fluoro modified nucleotide
  modified_base 7: mod_base = OTHER; note = 2'-O-methyl modified nucleotide
  modified_base 8: mod_base = OTHER; note = 2'-fluoro modified nucleotide
  modified_base 9: mod_base = OTHER; note = 2'-O-methyl modified nucleotide
  modified_base 10: mod_base = OTHER; note = 2'-fluoro modified nucleotide
  modified_base 11: mod_base = OTHER; note = 2'-O-methyl modified nucleotide
  modified_base 12: mod_base = OTHER; note = 2'-fluoro modified nucleotide
  modified_base 13: mod_base = OTHER; note = 2'-O-methyl modified nucleotide
  modified_base 14: mod_base = OTHER; note = 2'-fluoro modified nucleotide with phosphorothioate linkage
  modified_base 15: mod_base = OTHER; note = 2'-O-methyl modified nucleotide with phosphorothioate linkage
  modified_base 16: mod_base = OTHER; note = 2'-fluoro modified nucleotide with phosphorothioate linkage
  modified_base 17: mod_base = OTHER; note = 2'-O-methyl modified nucleotide with phosphorothioate linkage
  modified_base 18: mod_base = OTHER; note = 2'-fluoro modified nucleotide with phosphorothioate linkage
  misc_difference 19: note = 2'-O-methyl modified nucleotide may be attached to trivalent N-Acetylgalactosamine
taatccattgtcataggtt

SEQ ID NO: 804 - RNA, 19 nt, synthetic construct
  source 1..19: mol_type = other RNA
  misc_difference 1: note = 2'-O-methyl modified nucleotide with phosphorothioate linkage may be modified with 5'-Phosphate
  modified_base 2: mod_base = OTHER; note = 2'-fluoro modified nucleotide with phosphorothioate linkage
  modified_base 3: mod_base = OTHER; note = 2'-O-methyl modified nucleotide
  modified_base 4: mod_base = OTHER; note = 2'-fluoro modified nucleotide
  modified_base 5: mod_base = OTHER; note = 2'-O-methyl modified nucleotide
  modified_base 6: mod_base = OTHER; note = 2'-fluoro modified nucleotide
  modified_base 7: mod_base = OTHER; note = 2'-O-methyl modified nucleotide
  modified_base 8: mod_base = OTHER; note = 2'-fluoro modified nucleotide
  modified_base 9: mod_base = OTHER; note = 2'-O-methyl modified nucleotide
  modified_base 10: mod_base = OTHER; note = 2'-fluoro modified nucleotide
  modified_base 11: mod_base = OTHER; note = 2'-O-methyl modified nucleotide
  modified_base 12: mod_base = OTHER; note = 2'-fluoro modified nucleotide
  modified_base 13: mod_base = OTHER; note = 2'-O-methyl modified nucleotide
  modified_base 14: mod_base = OTHER; note = 2'-fluoro modified nucleotide with phosphorothioate linkage
  modified_base 15: mod_base = OTHER; note = 2'-O-methyl modified nucleotide with phosphorothioate linkage
  modified_base 16: mod_base = OTHER; note = 2'-fluoro modified nucleotide with phosphorothioate linkage
  modified_base 17: mod_base = OTHER; note = 2'-O-methyl modified nucleotide with phosphorothioate linkage
  modified_base 18: mod_base = OTHER; note = 2'-fluoro modified nucleotide with phosphorothioate linkage
  misc_difference 19: note = 2'-O-methyl modified nucleotide may be attached to trivalent N-Acetylgalactosamine
tatccattgtcataggtta

SEQ ID NO: 805 - RNA, 19 nt, synthetic construct
  source 1..19: mol_type = other RNA
  misc_difference 1: note = 2'-O-methyl modified nucleotide with phosphorothioate linkage may be modified with 5'-Phosphate
  modified_base 2: mod_base = OTHER; note = 2'-fluoro modified nucleotide with phosphorothioate linkage
  modified_base 3: mod_base = OTHER; note = 2'-O-methyl modified nucleotide
  modified_base 4: mod_base = OTHER; note = 2'-fluoro modified nucleotide
  modified_base 5: mod_base = OTHER; note = 2'-O-methyl modified nucleotide
  modified_base 6: mod_base = OTHER; note = 2'-fluoro modified nucleotide
  modified_base 7: mod_base = OTHER; note = 2'-O-methyl modified nucleotide
  modified_base 8: mod_base = OTHER; note = 2'-fluoro modified nucleotide
  modified_base 9: mod_base = OTHER; note = 2'-O-methyl modified nucleotide
  modified_base 10: mod_base = OTHER; note = 2'-fluoro modified nucleotide
  modified_base 11: mod_base = OTHER; note = 2'-O-methyl modified nucleotide
  modified_base 12: mod_base = OTHER; note = 2'-fluoro modified nucleotide
  modified_base 13: mod_base = OTHER; note = 2'-O-methyl modified nucleotide
  modified_base 14: mod_base = OTHER; note = 2'-fluoro modified nucleotide with phosphorothioate linkage
  modified_base 15: mod_base = OTHER; note = 2'-O-methyl modified nucleotide with phosphorothioate linkage
  modified_base 16: mod_base = OTHER; note = 2'-fluoro modified nucleotide with phosphorothioate linkage
  modified_base 17: mod_base = OTHER; note = 2'-O-methyl modified nucleotide with phosphorothioate linkage
  modified_base 18: mod_base = OTHER; note = 2'-fluoro modified nucleotide with phosphorothioate linkage
  misc_difference 19: note = 2'-O-methyl modified nucleotide may be attached to trivalent N-Acetylgalactosamine
tagaaatccattgtcatag

SEQ ID NO: 806 - RNA, 19 nt, synthetic construct
  source 1..19: mol_type = other RNA
  misc_difference 1: note = 2'-O-methyl modified nucleotide with phosphorothioate linkage may be modified with 5'-Phosphate
  modified_base 2: mod_base = OTHER; note = 2'-fluoro modified nucleotide with phosphorothioate linkage
  modified_base 3: mod_base = OTHER; note = 2'-O-methyl modified nucleotide
  modified_base 4: mod_base = OTHER; note = 2'-fluoro modified nucleotide
  modified_base 5: mod_base = OTHER; note = 2'-O-methyl modified nucleotide
  modified_base 6: mod_base = OTHER; note = 2'-fluoro modified nucleotide
  modified_base 7: mod_base = OTHER; note = 2'-O-methyl modified nucleotide
  modified_base 8: mod_base = OTHER; note = 2'-fluoro modified nucleotide
  modified_base 9: mod_base = OTHER; note = 2'-O-methyl modified nucleotide
  modified_base 10: mod_base = OTHER; note = 2'-fluoro modified nucleotide
  modified_base 11: mod_base = OTHER; note = 2'-O-methyl modified nucleotide
  modified_base 12: mod_base = OTHER; note = 2'-fluoro modified nucleotide
  modified_base 13: mod_base = OTHER; note = 2'-O-methyl modified nucleotide
  modified_base 14: mod_base = OTHER; note = 2'-fluoro modified nucleotide with phosphorothioate linkage
  modified_base 15: mod_base = OTHER; note = 2'-O-methyl modified nucleotide with phosphorothioate linkage
  modified_base 16: mod_base = OTHER; note = 2'-fluoro modified nucleotide with phosphorothioate linkage
  modified_base 17: mod_base = OTHER; note = 2'-O-methyl modified nucleotide with phosphorothioate linkage
  modified_base 18: mod_base = OTHER; note = 2'-fluoro modified nucleotide with phosphorothioate linkage
  misc_difference 19: note = 2'-O-methyl modified nucleotide may be attached to trivalent N-Acetylgalactosamine
tagacatattctttaactt

SEQ ID NO: 807 - RNA, 19 nt, synthetic construct
  source 1..19: mol_type = other RNA
  misc_difference 1: note = 2'-O-methyl modified nucleotide with phosphorothioate linkage may be modified with 5'-Phosphate
  modified_base 2: mod_base = OTHER; note = 2'-fluoro modified nucleotide with phosphorothioate linkage
  modified_base 3: mod_base = OTHER; note = 2'-O-methyl modified nucleotide
  modified_base 4: mod_base = OTHER; note = 2'-fluoro modified nucleotide
  modified_base 5: mod_base = OTHER; note = 2'-O-methyl modified nucleotide
  modified_base 6: mod_base = OTHER; note = 2'-fluoro modified nucleotide
  modified_base 7: mod_base = OTHER; note = 2'-O-methyl modified nucleotide
  modified_base 8: mod_base = OTHER; note = 2'-fluoro modified nucleotide
  modified_base 9: mod_base = OTHER; note = 2'-O-methyl modified nucleotide
  modified_base 10: mod_base = OTHER; note = 2'-fluoro modified nucleotide
  modified_base 11: mod_base = OTHER; note = 2'-O-methyl modified nucleotide
  modified_base 12: mod_base = OTHER; note = 2'-fluoro modified nucleotide
  modified_base 13: mod_base = OTHER; note = 2'-O-methyl modified nucleotide
  modified_base 14: mod_base = OTHER; note = 2'-fluoro modified nucleotide with phosphorothioate linkage
  modified_base 15: mod_base = OTHER; note = 2'-O-methyl modified nucleotide with phosphorothioate linkage
  modified_base 16: mod_base = OTHER; note = 2'-fluoro modified nucleotide with phosphorothioate linkage
  modified_base 17: mod_base = OTHER; note = 2'-O-methyl modified nucleotide with phosphorothioate linkage
  modified_base 18: mod_base = OTHER; note = 2'-fluoro modified nucleotide with phosphorothioate linkage
  misc_difference 19: note = 2'-O-methyl modified nucleotide may be attached to trivalent N-Acetylgalactosamine
tagtgcagattccctccac

SEQ ID NO: 808 - RNA, 19 nt, synthetic construct
  source 1..19: mol_type = other RNA
  misc_difference 1: note = 2'-O-methyl modified nucleotide with phosphorothioate linkage may be modified with 5'-Phosphate
  modified_base 2: mod_base = OTHER; note = 2'-fluoro modified nucleotide with phosphorothioate linkage
  modified_base 3: mod_base = OTHER; note = 2'-O-methyl modified nucleotide
  modified_base 4: mod_base = OTHER; note = 2'-fluoro modified nucleotide
  modified_base 5: mod_base = OTHER; note = 2'-O-methyl modified nucleotide
  modified_base 6: mod_base = OTHER; note = 2'-fluoro modified nucleotide
  modified_base 7: mod_base = OTHER; note = 2'-O-methyl modified nucleotide
  modified_base 8: mod_base = OTHER; note = 2'-fluoro modified nucleotide
  modified_base 9: mod_base = OTHER; note = 2'-O-methyl modified nucleotide
  modified_base 10: mod_base = OTHER; note = 2'-fluoro modified nucleotide
  modified_base 11: mod_base = OTHER; note = 2'-O-methyl modified nucleotide
  modified_base 12: mod_base = OTHER; note = 2'-fluoro modified nucleotide
  modified_base 13: mod_base = OTHER; note = 2'-O-methyl modified nucleotide
  modified_base 14: mod_base = OTHER; note = 2'-fluoro modified nucleotide with phosphorothioate linkage
  modified_base 15: mod_base = OTHER; note = 2'-O-methyl modified nucleotide with phosphorothioate linkage
  modified_base 16: mod_base = OTHER; note = 2'-fluoro modified nucleotide with phosphorothioate linkage
  modified_base 17: mod_base = OTHER; note = 2'-O-methyl modified nucleotide with phosphorothioate linkage
  modified_base 18: mod_base = OTHER; note = 2'-fluoro modified nucleotide with phosphorothioate linkage
  misc_difference 19: note = 2'-O-methyl modified nucleotide may be attached to trivalent N-Acetylgalactosamine
ttccattgtcataggttat

SEQ ID NO: 809 - RNA, 19 nt, synthetic construct
  source 1..19: mol_type = other RNA
  misc_difference 1: note = 2'-O-methyl modified nucleotide with phosphorothioate linkage may be modified with 5'-Phosphate
  modified_base 2: mod_base = OTHER; note = 2'-fluoro modified nucleotide with phosphorothioate linkage
  modified_base 3: mod_base = OTHER; note = 2'-O-methyl modified nucleotide
  modified_base 4: mod_base = OTHER; note = 2'-fluoro modified nucleotide
  modified_base 5: mod_base = OTHER; note = 2'-O-methyl modified nucleotide
  modified_base 6: mod_base = OTHER; note = 2'-fluoro modified nucleotide
  modified_base 7: mod_base = OTHER; note = 2'-O-methyl modified nucleotide
  modified_base 8: mod_base = OTHER; note = 2'-fluoro modified nucleotide
  modified_base 9: mod_base = OTHER; note = 2'-O-methyl modified nucleotide
  modified_base 10: mod_base = OTHER; note = 2'-fluoro modified nucleotide
  modified_base 11: mod_base = OTHER; note = 2'-O-methyl modified nucleotide
  modified_base 12: mod_base = OTHER; note = 2'-fluoro modified nucleotide
  modified_base 13: mod_base = OTHER; note = 2'-O-methyl modified nucleotide
  modified_base 14: mod_base = OTHER; note = 2'-fluoro modified nucleotide with phosphorothioate linkage
  modified_base 15: mod_base = OTHER; note = 2'-O-methyl modified nucleotide with phosphorothioate linkage
  modified_base 16: mod_base = OTHER; note = 2'-fluoro modified nucleotide with phosphorothioate linkage
  modified_base 17: mod_base = OTHER; note = 2'-O-methyl modified nucleotide with phosphorothioate linkage
  modified_base 18: mod_base = OTHER; note = 2'-fluoro modified nucleotide with phosphorothioate linkage
  misc_difference 19: note = 2'-O-methyl modified nucleotide may be attached to trivalent N-Acetylgalactosamine
tgacatctttgaacacctt

SEQ ID NO: 810 - RNA, 19 nt, synthetic construct
  source 1..19: mol_type = other RNA
  misc_difference 1: note = 2'-O-methyl modified nucleotide with phosphorothioate linkage may be modified with 5'-Phosphate
  modified_base 2: mod_base = OTHER; note = 2'-fluoro modified nucleotide with phosphorothioate linkage
  modified_base 3: mod_base = OTHER; note = 2'-O-methyl modified nucleotide
  modified_base 4: mod_base = OTHER; note = 2'-fluoro modified nucleotide
  modified_base 5: mod_base = OTHER; note = 2'-O-methyl modified nucleotide
  modified_base 6: mod_base = OTHER; note = 2'-fluoro modified nucleotide
  modified_base 7: mod_base = OTHER; note = 2'-O-methyl modified nucleotide
  modified_base 8: mod_base = OTHER; note = 2'-fluoro modified nucleotide
  modified_base 9: mod_base = OTHER; note = 2'-O-methyl modified nucleotide
  modified_base 10: mod_base = OTHER; note = 2'-fluoro modified nucleotide
  modified_base 11: mod_base = OTHER; note = 2'-O-methyl modified nucleotide
  modified_base 12: mod_base = OTHER; note = 2'-fluoro modified nucleotide
  modified_base 13: mod_base = OTHER; note = 2'-O-methyl modified nucleotide
  modified_base 14: mod_base = OTHER; note = 2'-fluoro modified nucleotide with phosphorothioate linkage
  modified_base 15: mod_base = OTHER; note = 2'-O-methyl modified nucleotide with phosphorothioate linkage
  modified_base 16: mod_base = OTHER; note = 2'-fluoro modified nucleotide with phosphorothioate linkage
  modified_base 17: mod_base = OTHER; note = 2'-O-methyl modified nucleotide with phosphorothioate linkage
  modified_base 18: mod_base = OTHER; note = 2'-fluoro modified nucleotide with phosphorothioate linkage
  misc_difference 19: note = 2'-O-methyl modified nucleotide may be attached to trivalent N-Acetylgalactosamine
tcattgtcataggttattg

SEQ ID NO: 811 - RNA, 19 nt, synthetic construct
  source 1..19: mol_type = other RNA
  misc_difference 1: note = 2'-O-methyl modified nucleotide with phosphorothioate linkage may be modified with 5'-Phosphate
  modified_base 2: mod_base = OTHER; note = 2'-fluoro modified nucleotide with phosphorothioate linkage
  modified_base 3: mod_base = OTHER; note = 2'-O-methyl modified nucleotide
  modified_base 4: mod_base = OTHER; note = 2'-fluoro modified nucleotide
  modified_base 5: mod_base = OTHER; note = 2'-O-methyl modified nucleotide
  modified_base 6: mod_base = OTHER; note = 2'-fluoro modified nucleotide
  modified_base 7: mod_base = OTHER; note = 2'-O-methyl modified nucleotide
  modified_base 8: mod_base = OTHER; note = 2'-fluoro modified nucleotide
  modified_base 9: mod_base = OTHER; note = 2'-O-methyl modified nucleotide
  modified_base 10: mod_base = OTHER; note = 2'-fluoro modified nucleotide
  modified_base 11: mod_base = OTHER; note = 2'-O-methyl modified nucleotide
  modified_base 12: mod_base = OTHER; note = 2'-fluoro modified nucleotide
  modified_base 13: mod_base = OTHER; note = 2'-O-methyl modified nucleotide
  modified_base 14: mod_base = OTHER; note = 2'-fluoro modified nucleotide with phosphorothioate linkage
  modified_base 15: mod_base = OTHER; note = 2'-O-methyl modified nucleotide with phosphorothioate linkage
  modified_base 16: mod_base = OTHER; note = 2'-fluoro modified nucleotide with phosphorothioate linkage
  modified_base 17: mod_base = OTHER; note = 2'-O-methyl modified nucleotide with phosphorothioate linkage
  modified_base 18: mod_base = OTHER; note = 2'-fluoro modified nucleotide with phosphorothioate linkage
  misc_difference 19: note = 2'-O-methyl modified nucleotide may be attached to trivalent N-Acetylgalactosamine
tgaagagaaatccattgtc

SEQ ID NO: 812 - RNA, 19 nt, synthetic construct
  source 1..19: mol_type = other RNA
  misc_difference 1: note = 2'-O-methyl modified nucleotide with phosphorothioate linkage may be modified with 5'-Phosphate
  modified_base 2: mod_base = OTHER; note = 2'-fluoro modified nucleotide with phosphorothioate linkage
  modified_base 3: mod_base = OTHER; note = 2'-O-methyl modified nucleotide
  modified_base 4: mod_base = OTHER; note = 2'-fluoro modified nucleotide
  modified_base 5: mod_base = OTHER; note = 2'-O-methyl modified nucleotide
  modified_base 6: mod_base = OTHER; note = 2'-fluoro modified nucleotide
  modified_base 7: mod_base = OTHER; note = 2'-O-methyl modified nucleotide
  modified_base 8: mod_base = OTHER; note = 2'-fluoro modified nucleotide
  modified_base 9: mod_base = OTHER; note = 2'-O-methyl modified nucleotide
  modified_base 10: mod_base = OTHER; note = 2'-fluoro modified nucleotide
  modified_base 11: mod_base = OTHER; note = 2'-O-methyl modified nucleotide
  modified_base 12: mod_base = OTHER; note = 2'-fluoro modified nucleotide
  modified_base 13: mod_base = OTHER; note = 2'-O-methyl modified nucleotide
  modified_base 14: mod_base = OTHER; note = 2'-fluoro modified nucleotide with phosphorothioate linkage
  modified_base 15: mod_base = OTHER; note = 2'-O-methyl modified nucleotide with phosphorothioate linkage
  modified_base 16: mod_base = OTHER; note = 2'-fluoro modified nucleotide with phosphorothioate linkage
  modified_base 17: mod_base = OTHER; note = 2'-O-methyl modified nucleotide with phosphorothioate linkage
  modified_base 18: mod_base = OTHER; note = 2'-fluoro modified nucleotide with phosphorothioate linkage
  misc_difference 19: note = 2'-O-methyl modified nucleotide may be attached to trivalent N-Acetylgalactosamine
tacatattctttaacttca

SEQ ID NO: 813 - RNA, 19 nt, synthetic construct
  source 1..19: mol_type = other RNA
  misc_difference 1: note = 2'-O-methyl modified nucleotide with phosphorothioate linkage may be modified with 5'-Phosphate
  modified_base 2: mod_base = OTHER; note = 2'-fluoro modified nucleotide with phosphorothioate linkage
  modified_base 3: mod_base = OTHER; note = 2'-O-methyl modified nucleotide
  modified_base 4: mod_base = OTHER; note = 2'-fluoro modified nucleotide
  modified_base 5: mod_base = OTHER; note = 2'-O-methyl modified nucleotide
  modified_base 6: mod_base = OTHER; note = 2'-fluoro modified nucleotide
  modified_base 7: mod_base = OTHER; note = 2'-O-methyl modified nucleotide
  modified_base 8: mod_base = OTHER; note = 2'-fluoro modified nucleotide
  modified_base 9: mod_base = OTHER; note = 2'-O-methyl modified nucleotide
  modified_base 10: mod_base = OTHER; note = 2'-fluoro modified nucleotide
  modified_base 11: mod_base = OTHER; note = 2'-O-methyl modified nucleotide
  modified_base 12: mod_base = OTHER; note = 2'-fluoro modified nucleotide
  modified_base 13: mod_base = OTHER; note = 2'-O-methyl modified nucleotide
  modified_base 14: mod_base = OTHER; note = 2'-fluoro modified nucleotide with phosphorothioate linkage
  modified_base 15: mod_base = OTHER; note = 2'-O-methyl modified nucleotide with phosphorothioate linkage
  modified_base 16: mod_base = OTHER; note = 2'-fluoro modified nucleotide with phosphorothioate linkage
  modified_base 17: mod_base = OTHER; note = 2'-O-methyl modified nucleotide with phosphorothioate linkage
  modified_base 18: mod_base = OTHER; note = 2'-fluoro modified nucleotide with phosphorothioate linkage
  misc_difference 19: note = 2'-O-methyl modified nucleotide may be attached to trivalent N-Acetylgalactosamine
tagtccttttacactcaaa

SEQ ID NO: 814 - RNA, 19 nt, synthetic construct
  source 1..19: mol_type = other RNA
  misc_difference 1: note = 2'-O-methyl modified nucleotide with phosphorothioate linkage may be modified with 5'-Phosphate
  modified_base 2: mod_base = OTHER; note = 2'-fluoro modified nucleotide with phosphorothioate linkage
  modified_base 3: mod_base = OTHER; note = 2'-O-methyl modified nucleotide
  modified_base 4: mod_base = OTHER; note = 2'-fluoro modified nucleotide
  modified_base 5: mod_base = OTHER; note = 2'-O-methyl modified nucleotide
  modified_base 6: mod_base = OTHER; note = 2'-fluoro modified nucleotide
  modified_base 7: mod_base = OTHER; note = 2'-O-methyl modified nucleotide
  modified_base 8: mod_base = OTHER; note = 2'-fluoro modified nucleotide
  modified_base 9: mod_base = OTHER; note = 2'-O-methyl modified nucleotide
  modified_base 10: mod_base = OTHER; note = 2'-fluoro modified nucleotide
  modified_base 11: mod_base = OTHER; note = 2'-O-methyl modified nucleotide
  modified_base 12: mod_base = OTHER; note = 2'-fluoro modified nucleotide
  modified_base 13: mod_base = OTHER; note = 2'-O-methyl modified nucleotide
  modified_base 14: mod_base = OTHER; note = 2'-fluoro modified nucleotide with phosphorothioate linkage
  modified_base 15: mod_base = OTHER; note = 2'-O-methyl modified nucleotide with phosphorothioate linkage
  modified_base 16: mod_base = OTHER; note = 2'-fluoro modified nucleotide with phosphorothioate linkage
  modified_base 17: mod_base = OTHER; note = 2'-O-methyl modified nucleotide with phosphorothioate linkage
  modified_base 18: mod_base = OTHER; note = 2'-fluoro modified nucleotide with phosphorothioate linkage
  misc_difference 19: note = 2'-O-methyl modified nucleotide may be attached to trivalent N-Acetylgalactosamine
tattttccttgaaagatcc

SEQ ID NO: 815 - RNA, 19 nt, synthetic construct
  source 1..19: mol_type = other RNA
  misc_difference 1: note = 2'-O-methyl modified nucleotide with phosphorothioate linkage may be modified with 5'-Phosphate
  modified_base 2: mod_base = OTHER; note = 2'-fluoro modified nucleotide with phosphorothioate linkage
  modified_base 3: mod_base = OTHER; note = 2'-O-methyl modified nucleotide
  modified_base 4: mod_base = OTHER; note = 2'-fluoro modified nucleotide
  modified_base 5: mod_base = OTHER; note = 2'-O-methyl modified nucleotide
  modified_base 6: mod_base = OTHER; note = 2'-fluoro modified nucleotide
  modified_base 7: mod_base = OTHER; note = 2'-O-methyl modified nucleotide
  modified_base 8: mod_base = OTHER; note = 2'-fluoro modified nucleotide
  modified_base 9: mod_base = OTHER; note = 2'-O-methyl modified nucleotide
  modified_base 10: mod_base = OTHER; note = 2'-fluoro modified nucleotide
  modified_base 11: mod_base = OTHER; note = 2'-O-methyl modified nucleotide
  modified_base 12: mod_base = OTHER; note = 2'-fluoro modified nucleotide
  modified_base 13: mod_base = OTHER; note = 2'-O-methyl modified nucleotide
  modified_base 14: mod_base = OTHER; note = 2'-fluoro modified nucleotide with phosphorothioate linkage
  modified_base 15: mod_base = OTHER; note = 2'-O-methyl modified nucleotide with phosphorothioate linkage
  modified_base 16: mod_base = OTHER; note = 2'-fluoro modified nucleotide with phosphorothioate linkage
  modified_base 17: mod_base = OTHER; note = 2'-O-methyl modified nucleotide with phosphorothioate linkage
  modified_base 18: mod_base = OTHER; note = 2'-fluoro modified nucleotide with phosphorothioate linkage
  misc_difference 19: note = 2'-O-methyl modified nucleotide may be attached to trivalent N-Acetylgalactosamine
tgaaattgtattttatctg

SEQ ID NO: 816 - RNA, 19 nt, synthetic construct
  source 1..19: mol_type = other RNA
  misc_difference 1: note = 2'-O-methyl modified nucleotide with phosphorothioate linkage may be modified with 5'-Phosphate
  modified_base 2: mod_base = OTHER; note = 2'-fluoro modified nucleotide with phosphorothioate linkage
  modified_base 3: mod_base = OTHER; note = 2'-O-methyl modified nucleotide
  modified_base 4: mod_base = OTHER; note = 2'-fluoro modified nucleotide
  modified_base 5: mod_base = OTHER; note = 2'-O-methyl modified nucleotide
  modified_base 6: mod_base = OTHER; note = 2'-fluoro modified nucleotide
  modified_base 7: mod_base = OTHER; note = 2'-O-methyl modified nucleotide
  modified_base 8: mod_base = OTHER; note = 2'-fluoro modified nucleotide
  modified_base 9: mod_base = OTHER; note = 2'-O-methyl modified nucleotide
  modified_base 10: mod_base = OTHER; note = 2'-fluoro modified nucleotide
  modified_base 11: mod_base = OTHER; note = 2'-O-methyl modified nucleotide
  modified_base 12: mod_base = OTHER; note = 2'-fluoro modified nucleotide
  modified_base 13: mod_base = OTHER; note = 2'-O-methyl modified nucleotide
  modified_base 14: mod_base = OTHER; note = 2'-fluoro modified nucleotide with phosphorothioate linkage
  modified_base 15: mod_base = OTHER; note = 2'-O-methyl modified nucleotide with phosphorothioate linkage
  modified_base 16: mod_base = OTHER; note = 2'-fluoro modified nucleotide with phosphorothioate linkage
  modified_base 17: mod_base = OTHER; note = 2'-O-methyl modified nucleotide with phosphorothioate linkage
  modified_base 18: mod_base = OTHER; note = 2'-fluoro modified nucleotide with phosphorothioate linkage
  misc_difference 19: note = 2'-O-methyl modified nucleotide may be attached to trivalent N-Acetylgalactosamine
tgtaatttcaaaattctta

SEQ ID NO: 817 - RNA, 19 nt, synthetic construct
  source 1..19: mol_type = other RNA
  misc_difference 1: note = 2'-O-methyl modified nucleotide with phosphorothioate linkage may be modified with 5'-Phosphate
  modified_base 2: mod_base = OTHER; note = 2'-fluoro modified nucleotide with phosphorothioate linkage
  modified_base 3: mod_base = OTHER; note = 2'-O-methyl modified nucleotide
  modified_base 4: mod_base = OTHER; note = 2'-fluoro modified nucleotide
  modified_base 5: mod_base = OTHER; note = 2'-O-methyl modified nucleotide
  modified_base 6: mod_base = OTHER; note = 2'-fluoro modified nucleotide
  modified_base 7: mod_base = OTHER; note = 2'-O-methyl modified nucleotide
  modified_base 8: mod_base = OTHER; note = 2'-fluoro modified nucleotide
  modified_base 9: mod_base = OTHER; note = 2'-O-methyl modified nucleotide
  modified_base 10: mod_base = OTHER; note = 2'-fluoro modified nucleotide
  modified_base 11: mod_base = OTHER; note = 2'-O-methyl modified nucleotide
  modified_base 12: mod_base = OTHER; note = 2'-fluoro modified nucleotide
  modified_base 13: mod_base = OTHER; note = 2'-O-methyl modified nucleotide
  modified_base 14: mod_base = OTHER; note = 2'-fluoro modified nucleotide with phosphorothioate linkage
  modified_base 15: mod_base = OTHER; note = 2'-O-methyl modified nucleotide with phosphorothioate linkage
  modified_base 16: mod_base = OTHER; note = 2'-fluoro modified nucleotide with phosphorothioate linkage
  modified_base 17: mod_base = OTHER; note = 2'-O-methyl modified nucleotide with phosphorothioate linkage
  modified_base 18: mod_base = OTHER; note = 2'-fluoro modified nucleotide with phosphorothioate linkage
  misc_difference 19: note = 2'-O-methyl modified nucleotide may be attached to trivalent N-Acetylgalactosamine
taaaattcttaaagttctt

SEQ ID NO: 818 - RNA, 19 nt, synthetic construct
  source 1..19: mol_type = other RNA
  misc_difference 1: note = 2'-O-methyl modified nucleotide with phosphorothioate linkage may be modified with 5'-Phosphate
  modified_base 2: mod_base = OTHER; note = 2'-fluoro modified nucleotide with phosphorothioate linkage
  modified_base 3: mod_base = OTHER; note = 2'-O-methyl modified nucleotide
  modified_base 4: mod_base = OTHER; note = 2'-fluoro modified nucleotide
  modified_base 5: mod_base = OTHER; note = 2'-O-methyl modified nucleotide
  modified_base 6: mod_base = OTHER; note = 2'-fluoro modified nucleotide
  modified_base 7: mod_base = OTHER; note = 2'-O-methyl modified nucleotide
  modified_base 8: mod_base = OTHER; note = 2'-fluoro modified nucleotide
  modified_base 9: mod_base = OTHER; note = 2'-O-methyl modified nucleotide
  modified_base 10: mod_base = OTHER; note = 2'-fluoro modified nucleotide
  modified_base 11: mod_base = OTHER; note = 2'-O-methyl modified nucleotide
  modified_base 12: mod_base = OTHER; note = 2'-fluoro modified nucleotide
  modified_base 13: mod_base = OTHER; note = 2'-O-methyl modified nucleotide
  modified_base 14: mod_base = OTHER; note = 2'-fluoro modified nucleotide with phosphorothioate linkage
  modified_base 15: mod_base = OTHER; note = 2'-O-methyl modified nucleotide with phosphorothioate linkage
  modified_base 16: mod_base = OTHER; note = 2'-fluoro modified nucleotide with phosphorothioate linkage
  modified_base 17: mod_base = OTHER; note = 2'-O-methyl modified nucleotide with phosphorothioate linkage
  modified_base 18: mod_base = OTHER; note = 2'-fluoro modified nucleotide with phosphorothioate linkage
  misc_difference 19: note = 2'-O-methyl modified nucleotide may be attached to trivalent N-Acetylgalactosamine
tgaattttggttctgctct

SEQ ID NO: 819 - RNA, 19 nt, synthetic construct
  source 1..19: mol_type = other RNA
  misc_difference 1: note = 2'-O-methyl modified nucleotide with phosphorothioate linkage may be modified with 5'-Phosphate
  modified_base 2: mod_base = OTHER; note = 2'-fluoro modified nucleotide with phosphorothioate linkage
  modified_base 3: mod_base = OTHER; note = 2'-O-methyl modified nucleotide
  modified_base 4: mod_base = OTHER; note = 2'-fluoro modified nucleotide
  modified_base 5: mod_base = OTHER; note = 2'-O-methyl modified nucleotide
  modified_base 6: mod_base = OTHER; note = 2'-fluoro modified nucleotide
  modified_base 7: mod_base = OTHER; note = 2'-O-methyl modified nucleotide
  modified_base 8: mod_base = OTHER; note = 2'-fluoro modified nucleotide
  modified_base 9: mod_base = OTHER; note = 2'-O-methyl modified nucleotide
  modified_base 10: mod_base = OTHER; note = 2'-fluoro modified nucleotide
  modified_base 11: mod_base = OTHER; note = 2'-O-methyl modified nucleotide
  modified_base 12: mod_base = OTHER; note = 2'-fluoro modified nucleotide
  modified_base 13: mod_base = OTHER; note = 2'-O-methyl modified nucleotide
  modified_base 14: mod_base = OTHER; note = 2'-fluoro modified nucleotide with phosphorothioate linkage
  modified_base 15: mod_base = OTHER; note = 2'-O-methyl modified nucleotide with phosphorothioate linkage
  modified_base 16: mod_base = OTHER; note = 2'-fluoro modified nucleotide with phosphorothioate linkage
  modified_base 17: mod_base = OTHER; note = 2'-O-methyl modified nucleotide with phosphorothioate linkage
  modified_base 18: mod_base = OTHER; note = 2'-fluoro modified nucleotide with phosphorothioate linkage
  misc_difference 19: note = 2'-O-methyl modified nucleotide may be attached to trivalent N-Acetylgalactosamine
tgtcattttataattatgt

SEQ ID NO: 820 - RNA, 19 nt, synthetic construct
  source 1..19: mol_type = other RNA
  misc_difference 1: note = 2'-O-methyl modified nucleotide with phosphorothioate linkage may be modified with 5'-Phosphate
  modified_base 2: mod_base = OTHER; note = 2'-fluoro modified nucleotide with phosphorothioate linkage
  modified_base 3: mod_base = OTHER; note = 2'-O-methyl modified nucleotide
  modified_base 4: mod_base = OTHER; note = 2'-fluoro modified nucleotide
  modified_base 5: mod_base = OTHER; note = 2'-O-methyl modified nucleotide
  modified_base 6: mod_base = OTHER; note = 2'-fluoro modified nucleotide
  modified_base 7: mod_base = OTHER; note = 2'-O-methyl modified nucleotide
  modified_base 8: mod_base = OTHER; note = 2'-fluoro modified nucleotide
  modified_base 9: mod_base = OTHER; note = 2'-O-methyl modified nucleotide
  modified_base 10: mod_base = OTHER; note = 2'-fluoro modified nucleotide
  modified_base 11: mod_base = OTHER; note = 2'-O-methyl modified nucleotide
  modified_base 12: mod_base = OTHER; note = 2'-fluoro modified nucleotide
  modified_base 13: mod_base = OTHER; note = 2'-O-methyl modified nucleotide
  modified_base 14: mod_base = OTHER; note = 2'-fluoro modified nucleotide with phosphorothioate linkage
  modified_base 15: mod_base = OTHER; note = 2'-O-methyl modified nucleotide with phosphorothioate linkage
  modified_base 16: mod_base = OTHER; note = 2'-fluoro modified nucleotide with phosphorothioate linkage
  modified_base 17: mod_base = OTHER; note = 2'-O-methyl modified nucleotide with phosphorothioate linkage
  modified_base 18: mod_base = OTHER; note = 2'-fluoro modified nucleotide with phosphorothioate linkage
  misc_difference 19: note = 2'-O-methyl modified nucleotide may be attached to trivalent N-Acetylgalactosamine
tcaaatcctgtactgacaa

SEQ ID NO: 821 - RNA, 19 nt, synthetic construct
  source 1..19: mol_type = other RNA
  misc_difference 1: note = 2'-O-methyl modified nucleotide with phosphorothioate linkage may be modified with 5'-Phosphate
  modified_base 2: mod_base = OTHER; note = 2'-fluoro modified nucleotide with phosphorothioate linkage
  modified_base 3: mod_base = OTHER; note = 2'-O-methyl modified nucleotide
  modified_base 4: mod_base = OTHER; note = 2'-fluoro modified nucleotide
  modified_base 5: mod_base = OTHER; note = 2'-O-methyl modified nucleotide
  modified_base 6: mod_base = OTHER; note = 2'-fluoro modified nucleotide
  modified_base 7: mod_base = OTHER; note = 2'-O-methyl modified nucleotide
  modified_base 8: mod_base = OTHER; note = 2'-fluoro modified nucleotide
  modified_base 9: mod_base = OTHER; note = 2'-O-methyl modified nucleotide
  modified_base 10: mod_base = OTHER; note = 2'-fluoro modified nucleotide
  modified_base 11: mod_base = OTHER; note = 2'-O-methyl modified nucleotide
  modified_base 12: mod_base = OTHER; note = 2'-fluoro modified nucleotide
  modified_base 13: mod_base = OTHER; note = 2'-O-methyl modified nucleotide
  modified_base 14: mod_base = OTHER; note = 2'-fluoro modified nucleotide with phosphorothioate linkage
  modified_base 15: mod_base = OTHER; note = 2'-O-methyl modified nucleotide with phosphorothioate linkage
  modified_base 16: mod_base = OTHER; note = 2'-fluoro modified nucleotide with phosphorothioate linkage
  modified_base 17: mod_base = OTHER; note = 2'-O-methyl modified nucleotide with phosphorothioate linkage
  modified_base 18: mod_base = OTHER; note = 2'-fluoro modified nucleotide with phosphorothioate linkage
  misc_difference 19: note = 2'-O-methyl modified nucleotide may be attached to trivalent N-Acetylgalactosamine
tgataacttttaatagaga

SEQ ID NO: 822 - RNA, 19 nt, synthetic construct
  source 1..19: mol_type = other RNA
  misc_difference 1: note = 2'-O-methyl modified nucleotide with phosphorothioate linkage may be modified with 5'-Phosphate
  modified_base 2: mod_base = OTHER; note = 2'-fluoro modified nucleotide with phosphorothioate linkage
  modified_base 3: mod_base = OTHER; note = 2'-O-methyl modified nucleotide
  modified_base 4: mod_base = OTHER; note = 2'-fluoro modified nucleotide
  modified_base 5: mod_base = OTHER; note = 2'-O-methyl modified nucleotide
  modified_base 6: mod_base = OTHER; note = 2'-fluoro modified nucleotide
  modified_base 7: mod_base = OTHER; note = 2'-O-methyl modified nucleotide
  modified_base 8: mod_base = OTHER; note = 2'-fluoro modified nucleotide
  modified_base 9: mod_base = OTHER; note = 2'-O-methyl modified nucleotide
  modified_base 10: mod_base = OTHER; note = 2'-fluoro modified nucleotide
  modified_base 11: mod_base = OTHER; note = 2'-O-methyl modified nucleotide
  modified_base 12: mod_base = OTHER; note = 2'-fluoro modified nucleotide
  modified_base 13: mod_base = OTHER; note = 2'-O-methyl modified nucleotide
  modified_base 14: mod_base = OTHER; note = 2'-fluoro modified nucleotide with phosphorothioate linkage
  modified_base 15: mod_base = OTHER; note = 2'-O-methyl modified nucleotide with phosphorothioate linkage
  modified_base 16: mod_base = OTHER; note = 2'-fluoro modified nucleotide with phosphorothioate linkage
  modified_base 17: mod_base = OTHER; note = 2'-O-methyl modified nucleotide with phosphorothioate linkage
  modified_base 18: mod_base = OTHER; note = 2'-fluoro modified nucleotide with phosphorothioate linkage
  misc_difference 19: note = 2'-O-methyl modified nucleotide may be attached to trivalent N-Acetylgalactosamine
tttaagtcttctcttattc

SEQ ID NO: 823 - RNA, 19 nt, synthetic construct
  source 1..19: mol_type = other RNA
  misc_difference 1: note = 2'-O-methyl modified nucleotide with phosphorothioate linkage may be modified with 5'-Phosphate
  modified_base 2: mod_base = OTHER; note = 2'-fluoro modified nucleotide with phosphorothioate linkage
  modified_base 3: mod_base = OTHER; note = 2'-O-methyl modified nucleotide
  modified_base 4: mod_base = OTHER; note = 2'-fluoro modified nucleotide
  modified_base 5: mod_base = OTHER; note = 2'-O-methyl modified nucleotide
  modified_base 6: mod_base = OTHER; note = 2'-fluoro modified nucleotide
  modified_base 7: mod_base = OTHER; note = 2'-O-methyl modified nucleotide
  modified_base 8: mod_base = OTHER; note = 2'-fluoro modified nucleotide
  modified_base 9: mod_base = OTHER; note = 2'-O-methyl modified nucleotide
  modified_base 10: mod_base = OTHER; note = 2'-fluoro modified nucleotide
  modified_base 11: mod_base = OTHER; note = 2'-O-methyl modified nucleotide
  modified_base 12: mod_base = OTHER; note = 2'-fluoro modified nucleotide
  modified_base 13: mod_base = OTHER; note = 2'-O-methyl modified nucleotide
  modified_base 14: mod_base = OTHER; note = 2'-fluoro modified nucleotide with phosphorothioate linkage
  modified_base 15: mod_base = OTHER; note = 2'-O-methyl modified nucleotide with phosphorothioate linkage
  modified_base 16: mod_base = OTHER; note = 2'-fluoro modified nucleotide with phosphorothioate linkage
  modified_base 17: mod_base = OTHER; note = 2'-O-methyl modified nucleotide with phosphorothioate linkage
  modified_base 18: mod_base = OTHER; note = 2'-fluoro modified nucleotide with phosphorothioate linkage
  misc_difference 19: note = 2'-O-methyl modified nucleotide may be attached to trivalent N-Acetylgalactosamine
tataattccaatatgatca

SEQ ID NO: 824 - RNA, 19 nt, synthetic construct
  source 1..19: mol_type = other RNA
  misc_difference 1: note = 2'-O-methyl modified nucleotide with phosphorothioate linkage may be modified with 5'-Phosphate
  modified_base 2: mod_base = OTHER; note = 2'-fluoro modified nucleotide with phosphorothioate linkage
  modified_base 3: mod_base = OTHER; note = 2'-O-methyl modified nucleotide
  modified_base 4: mod_base = OTHER; note = 2'-fluoro modified nucleotide
  modified_base 5: mod_base = OTHER; note = 2'-O-methyl modified nucleotide
  modified_base 6: mod_base = OTHER; note = 2'-fluoro modified nucleotide
  modified_base 7: mod_base = OTHER; note = 2'-O-methyl modified nucleotide
  modified_base 8: mod_base = OTHER; note = 2'-fluoro modified nucleotide
  modified_base 9: mod_base = OTHER; note = 2'-O-methyl modified nucleotide
  modified_base 10: mod_base = OTHER; note = 2'-fluoro modified nucleotide
  modified_base 11: mod_base = OTHER; note = 2'-O-methyl modified nucleotide
  modified_base 12: mod_base = OTHER; note = 2'-fluoro modified nucleotide
  modified_base 13: mod_base = OTHER; note = 2'-O-methyl modified nucleotide
  modified_base 14: mod_base = OTHER; note = 2'-fluoro modified nucleotide with phosphorothioate linkage
  modified_base 15: mod_base = OTHER; note = 2'-O-methyl modified nucleotide with phosphorothioate linkage
  modified_base 16: mod_base = OTHER; note = 2'-fluoro modified nucleotide with phosphorothioate linkage
  modified_base 17: mod_base = OTHER; note = 2'-O-methyl modified nucleotide with phosphorothioate linkage
  modified_base 18: mod_base = OTHER; note = 2'-fluoro modified nucleotide with phosphorothioate linkage
  misc_difference 19: note = 2'-O-methyl modified nucleotide may be attached to trivalent N-Acetylgalactosamine
tgataaatgaacatggcct

SEQ ID NO: 825 - RNA, 19 nt, synthetic construct
  source 1..19: mol_type = other RNA
  misc_difference 1: note = 2'-O-methyl modified nucleotide with phosphorothioate linkage may be modified with 5'-Phosphate
  modified_base 2: mod_base = OTHER; note = 2'-fluoro modified nucleotide with phosphorothioate linkage
  modified_base 3: mod_base = OTHER; note = 2'-O-methyl modified nucleotide
  modified_base 4: mod_base = OTHER; note = 2'-fluoro modified nucleotide
  modified_base 5: mod_base = OTHER; note = 2'-O-methyl modified nucleotide
  modified_base 6: mod_base = OTHER; note = 2'-fluoro modified nucleotide
  modified_base 7: mod_base = OTHER; note = 2'-O-methyl modified nucleotide
  modified_base 8: mod_base = OTHER; note = 2'-fluoro modified nucleotide
  modified_base 9: mod_base = OTHER; note = 2'-O-methyl modified nucleotide
  modified_base 10: mod_base = OTHER; note = 2'-fluoro modified nucleotide
  modified_base 11: mod_base = OTHER; note = 2'-O-methyl modified nucleotide
  modified_base 12: mod_base = OTHER; note = 2'-fluoro modified nucleotide
  modified_base 13: mod_base = OTHER; note = 2'-O-methyl modified nucleotide
  modified_base 14: mod_base = OTHER; note = 2'-fluoro modified nucleotide with phosphorothioate linkage
  modified_base 15: mod_base = OTHER; note = 2'-O-methyl modified nucleotide with phosphorothioate linkage
  modified_base 16: mod_base = OTHER; note = 2'-fluoro modified nucleotide with phosphorothioate linkage
  modified_base 17: mod_base = OTHER; note = 2'-O-methyl modified nucleotide with phosphorothioate linkage
  modified_base 18: mod_base = OTHER; note = 2'-fluoro modified nucleotide with phosphorothioate linkage
  misc_difference 19: note = 2'-O-methyl modified nucleotide may be attached to trivalent N-Acetylgalactosamine
taaggttcatcattttctt

SEQ ID NO: 826 - RNA, 19 nt, synthetic construct
  source 1..19: mol_type = other RNA
  misc_difference 1: note = 2'-O-methyl modified nucleotide with phosphorothioate linkage may be modified with 5'-Phosphate
  modified_base 2: mod_base = OTHER; note = 2'-fluoro modified nucleotide with phosphorothioate linkage
  modified_base 3: mod_base = OTHER; note = 2'-O-methyl modified nucleotide
  modified_base 4: mod_base = OTHER; note = 2'-fluoro modified nucleotide
  modified_base 5: mod_base = OTHER; note = 2'-O-methyl modified nucleotide
  modified_base 6: mod_base = OTHER; note = 2'-fluoro modified nucleotide
  modified_base 7: mod_base = OTHER; note = 2'-O-methyl modified nucleotide
  modified_base 8: mod_base = OTHER; note = 2'-fluoro modified nucleotide
  modified_base 9: mod_base = OTHER; note = 2'-O-methyl modified nucleotide
  modified_base 10: mod_base = OTHER; note = 2'-fluoro modified nucleotide
  modified_base 11: mod_base = OTHER; note = 2'-O-methyl modified nucleotide
  modified_base 12: mod_base = OTHER; note = 2'-fluoro modified nucleotide
  modified_base 13: mod_base = OTHER; note = 2'-O-methyl modified nucleotide
  modified_base 14: mod_base = OTHER; note = 2'-fluoro modified nucleotide with phosphorothioate linkage
  modified_base 15: mod_base = OTHER; note = 2'-O-methyl modified nucleotide with phosphorothioate linkage
  modified_base 16: mod_base = OTHER; note = 2'-fluoro modified nucleotide with phosphorothioate linkage
  modified_base 17: mod_base = OTHER; note = 2'-O-methyl modified nucleotide with phosphorothioate linkage
  modified_base 18: mod_base = OTHER; note = 2'-fluoro modified nucleotide with phosphorothioate linkage
  misc_difference 19: note = 2'-O-methyl modified nucleotide may be attached to trivalent N-Acetylgalactosamine
tggaagtgctataaaacat

SEQ ID NO: 827 - RNA, 19 nt, synthetic construct
  source 1..19: mol_type = other RNA
  misc_difference 1: note = 2'-O-methyl modified nucleotide with phosphorothioate linkage may be modified with 5'-Phosphate
  modified_base 2: mod_base = OTHER; note = 2'-fluoro modified nucleotide with phosphorothioate linkage
  modified_base 3: mod_base = OTHER; note = 2'-O-methyl modified nucleotide
  modified_base 4: mod_base = OTHER; note = 2'-fluoro modified nucleotide
  modified_base 5: mod_base = OTHER; note = 2'-O-methyl modified nucleotide
  modified_base 6: mod_base = OTHER; note = 2'-fluoro modified nucleotide
  modified_base 7: mod_base = OTHER; note = 2'-O-methyl modified nucleotide
  modified_base 8: mod_base = OTHER; note = 2'-fluoro modified nucleotide
  modified_base 9: mod_base = OTHER; note = 2'-O-methyl modified nucleotide
  modified_base 10: mod_base = OTHER; note = 2'-fluoro modified nucleotide
  modified_base 11: mod_base = OTHER; note = 2'-O-methyl modified nucleotide
  modified_base 12: mod_base = OTHER; note = 2'-fluoro modified nucleotide
  modified_base 13: mod_base = OTHER; note = 2'-O-methyl modified nucleotide
  modified_base 14: mod_base = OTHER; note = 2'-fluoro modified nucleotide with phosphorothioate linkage
  modified_base 15: mod_base = OTHER; note = 2'-O-methyl modified nucleotide with phosphorothioate linkage
  modified_base 16: mod_base = OTHER; note = 2'-fluoro modified nucleotide with phosphorothioate linkage
  modified_base 17: mod_base = OTHER; note = 2'-O-methyl modified nucleotide with phosphorothioate linkage
  modified_base 18: mod_base = OTHER; note = 2'-fluoro modified nucleotide with phosphorothioate linkage
  misc_difference 19: note = 2'-O-methyl modified nucleotide may be attached to trivalent N-Acetylgalactosamine
tcaagtactcttaaagcaa

SEQ ID NO: 828 - RNA, 19 nt, synthetic construct
  source 1..19: mol_type = other RNA
  misc_difference 1: note = 2'-O-methyl modified nucleotide with phosphorothioate linkage may be modified with 5'-Phosphate
  modified_base 2: mod_base = OTHER; note = 2'-fluoro modified nucleotide with phosphorothioate linkage
  modified_base 3: mod_base = OTHER; note = 2'-O-methyl modified nucleotide
  modified_base 4: mod_base = OTHER; note = 2'-fluoro modified nucleotide
  modified_base 5: mod_base = OTHER; note = 2'-O-methyl modified nucleotide
  modified_base 6: mod_base = OTHER; note = 2'-fluoro modified nucleotide
  modified_base 7: mod_base = OTHER; note = 2'-O-methyl modified nucleotide
  modified_base 8: mod_base = OTHER; note = 2'-fluoro modified nucleotide
  modified_base 9: mod_base = OTHER; note = 2'-O-methyl modified nucleotide
  modified_base 10: mod_base = OTHER; note = 2'-fluoro modified nucleotide
  modified_base 11: mod_base = OTHER; note = 2'-O-methyl modified nucleotide
  modified_base 12: mod_base = OTHER; note = 2'-fluoro modified nucleotide
  modified_base 13: mod_base = OTHER; note = 2'-O-methyl modified nucleotide
  modified_base 14: mod_base = OTHER; note = 2'-fluoro modified nucleotide with phosphorothioate linkage
  modified_base 15: mod_base = OTHER; note = 2'-O-methyl modified nucleotide with phosphorothioate linkage
  modified_base 16: mod_base = OTHER; note = 2'-fluoro modified nucleotide with phosphorothioate linkage
  modified_base 17: mod_base = OTHER; note = 2'-O-methyl modified nucleotide with phosphorothioate linkage
  modified_base 18: mod_base = OTHER; note = 2'-fluoro modified nucleotide with phosphorothioate linkage
  misc_difference 19: note = 2'-O-methyl modified nucleotide may be attached to trivalent N-Acetylgalactosamine
tccaatgatttcctgtttc

SEQ ID NO: 829 - RNA, 19 nt, synthetic construct
  source 1..19: mol_type = other RNA
  misc_difference 1: note = 2'-O-methyl modified nucleotide with phosphorothioate linkage may be modified with 5'-Phosphate
  modified_base 2: mod_base = OTHER; note = 2'-fluoro modified nucleotide with phosphorothioate linkage
  modified_base 3: mod_base = OTHER; note = 2'-O-methyl modified nucleotide
  modified_base 4: mod_base = OTHER; note = 2'-fluoro modified nucleotide
  modified_base 5: mod_base = OTHER; note = 2'-O-methyl modified nucleotide
  modified_base 6: mod_base = OTHER; note = 2'-fluoro modified nucleotide
  modified_base 7: mod_base = OTHER; note = 2'-O-methyl modified nucleotide
  modified_base 8: mod_base = OTHER; note = 2'-fluoro modified nucleotide
  modified_base 9: mod_base = OTHER; note = 2'-O-methyl modified nucleotide
  modified_base 10: mod_base = OTHER; note = 2'-fluoro modified nucleotide
  modified_base 11: mod_base = OTHER; note = 2'-O-methyl modified nucleotide
  modified_base 12: mod_base = OTHER; note = 2'-fluoro modified nucleotide
  modified_base 13: mod_base = OTHER; note = 2'-O-methyl modified nucleotide
  modified_base 14: mod_base = OTHER; note = 2'-fluoro modified nucleotide with phosphorothioate linkage
  modified_base 15: mod_base = OTHER; note = 2'-O-methyl modified nucleotide with phosphorothioate linkage
  modified_base 16: mod_base = OTHER; note = 2'-fluoro modified nucleotide with phosphorothioate linkage
  modified_base 17: mod_base = OTHER; note = 2'-O-methyl modified nucleotide with phosphorothioate linkage
  modified_base 18: mod_base = OTHER; note = 2'-fluoro modified nucleotide with phosphorothioate linkage
  misc_difference 19: note = 2'-O-methyl modified nucleotide may be attached to trivalent N-Acetylgalactosamine
tatggtatattcatttcca

SEQ ID NO: 830 - RNA, 19 nt, synthetic construct
  source 1..19: mol_type = other RNA
  misc_difference 1: note = 2'-O-methyl modified nucleotide with phosphorothioate linkage may be modified with 5'-Phosphate
  modified_base 2: mod_base = OTHER; note = 2'-fluoro modified nucleotide with phosphorothioate linkage
  modified_base 3: mod_base = OTHER; note = 2'-O-methyl modified nucleotide
  modified_base 4: mod_base = OTHER; note = 2'-fluoro modified nucleotide
  modified_base 5: mod_base = OTHER; note = 2'-O-methyl modified nucleotide
  modified_base 6: mod_base = OTHER; note = 2'-fluoro modified nucleotide
  modified_base 7: mod_base = OTHER; note = 2'-O-methyl modified nucleotide
  modified_base 8: mod_base = OTHER; note = 2'-fluoro modified nucleotide
  modified_base 9: mod_base = OTHER; note = 2'-O-methyl modified nucleotide
  modified_base 10: mod_base = OTHER; note = 2'-fluoro modified nucleotide
  modified_base 11: mod_base = OTHER; note = 2'-O-methyl modified nucleotide
  modified_base 12: mod_base = OTHER; note = 2'-fluoro modified nucleotide
  modified_base 13: mod_base = OTHER; note = 2'-O-methyl modified nucleotide
  modified_base 14: mod_base = OTHER; note = 2'-fluoro modified nucleotide with phosphorothioate linkage
  modified_base 15: mod_base = OTHER; note = 2'-O-methyl modified nucleotide with phosphorothioate linkage
  modified_base 16: mod_base = OTHER; note = 2'-fluoro modified nucleotide with phosphorothioate linkage
  modified_base 17: mod_base = OTHER; note = 2'-O-methyl modified nucleotide with phosphorothioate linkage
  modified_base 18: mod_base = OTHER; note = 2'-fluoro modified nucleotide with phosphorothioate linkage
  misc_difference 19: note = 2'-O-methyl modified nucleotide may be attached to trivalent N-Acetylgalactosamine
taacaagatgaacttccca

SEQ ID NO: 831 - RNA, 19 nt, synthetic construct
  source 1..19: mol_type = other RNA
  misc_difference 1: note = 2'-O-methyl modified nucleotide with phosphorothioate linkage may be modified with 5'-Phosphate
  modified_base 2: mod_base = OTHER; note = 2'-fluoro modified nucleotide with phosphorothioate linkage
  modified_base 3: mod_base = OTHER; note = 2'-O-methyl modified nucleotide
  modified_base 4: mod_base = OTHER; note = 2'-fluoro modified nucleotide
  modified_base 5: mod_base = OTHER; note = 2'-O-methyl modified nucleotide
  modified_base 6: mod_base = OTHER; note = 2'-fluoro modified nucleotide
  modified_base 7: mod_base = OTHER; note = 2'-O-methyl modified nucleotide
  modified_base 8: mod_base = OTHER; note = 2'-fluoro modified nucleotide
  modified_base 9: mod_base = OTHER; note = 2'-O-methyl modified nucleotide
  modified_base 10: mod_base = OTHER; note = 2'-fluoro modified nucleotide
  modified_base 11: mod_base = OTHER; note = 2'-O-methyl modified nucleotide
  modified_base 12: mod_base = OTHER; note = 2'-fluoro modified nucleotide
  modified_base 13: mod_base = OTHER; note = 2'-O-methyl modified nucleotide
  modified_base 14: mod_base = OTHER; note = 2'-fluoro modified nucleotide with phosphorothioate linkage
  modified_base 15: mod_base = OTHER; note = 2'-O-methyl modified nucleotide with phosphorothioate linkage
  modified_base 16: mod_base = OTHER; note = 2'-fluoro modified nucleotide with phosphorothioate linkage
  modified_base 17: mod_base = OTHER; note = 2'-O-methyl modified nucleotide with phosphorothioate linkage
  modified_base 18: mod_base = OTHER; note = 2'-fluoro modified nucleotide with phosphorothioate linkage
  misc_difference 19: note = 2'-O-methyl modified nucleotide may be attached to trivalent N-Acetylgalactosamine
tgaacttcaggaattttag

SEQ ID NO: 832 - RNA, 19 nt, synthetic construct
  source 1..19: mol_type = other RNA
  misc_difference 1: note = 2'-O-methyl modified nucleotide with phosphorothioate linkage may be modified with 5'-Phosphate
  modified_base 2: mod_base = OTHER; note = 2'-fluoro modified nucleotide with phosphorothioate linkage
  modified_base 3: mod_base = OTHER; note = 2'-O-methyl modified nucleotide
  modified_base 4: mod_base = OTHER; note = 2'-fluoro modified nucleotide
  modified_base 5: mod_base = OTHER; note = 2'-O-methyl modified nucleotide
  modified_base 6: mod_base = OTHER; note = 2'-fluoro modified nucleotide
  modified_base 7: mod_base = OTHER; note = 2'-O-methyl modified nucleotide
  modified_base 8: mod_base = OTHER; note = 2'-fluoro modified nucleotide
  modified_base 9: mod_base = OTHER; note = 2'-O-methyl modified nucleotide
  modified_base 10: mod_base = OTHER; note = 2'-fluoro modified nucleotide
  modified_base 11: mod_base = OTHER; note = 2'-O-methyl modified nucleotide
  modified_base 12: mod_base = OTHER; note = 2'-fluoro modified nucleotide
  modified_base 13: mod_base = OTHER; note = 2'-O-methyl modified nucleotide
  modified_base 14: mod_base = OTHER; note = 2'-fluoro modified nucleotide with phosphorothioate linkage
  modified_base 15: mod_base = OTHER; note = 2'-O-methyl modified nucleotide with phosphorothioate linkage
  modified_base 16: mod_base = OTHER; note = 2'-fluoro modified nucleotide with phosphorothioate linkage
  modified_base 17: mod_base = OTHER; note = 2'-O-methyl modified nucleotide with phosphorothioate linkage
  modified_base 18: mod_base = OTHER; note = 2'-fluoro modified nucleotide with phosphorothioate linkage
  misc_difference 19: note = 2'-O-methyl modified nucleotide may be attached to trivalent N-Acetylgalactosamine
tagtcttctcttattccaa

SEQ ID NO: 833 - RNA, 19 nt, synthetic construct
  source 1..19: mol_type = other RNA
  misc_difference 1: note = 2'-O-methyl modified nucleotide with phosphorothioate linkage may be modified with 5'-Phosphate
  modified_base 2: mod_base = OTHER; note = 2'-fluoro modified nucleotide with phosphorothioate linkage
  modified_base 3: mod_base = OTHER; note = 2'-O-methyl modified nucleotide
  modified_base 4: mod_base = OTHER; note = 2'-fluoro modified nucleotide
  modified_base 5: mod_base = OTHER; note = 2'-O-methyl modified nucleotide
  modified_base 6: mod_base = OTHER; note = 2'-fluoro modified nucleotide
  modified_base 7: mod_base = OTHER; note = 2'-O-methyl modified nucleotide
  modified_base 8: mod_base = OTHER; note = 2'-fluoro modified nucleotide
  modified_base 9: mod_base = OTHER; note = 2'-O-methyl modified nucleotide
  modified_base 10: mod_base = OTHER; note = 2'-fluoro modified nucleotide
  modified_base 11: mod_base = OTHER; note = 2'-O-methyl modified nucleotide
  modified_base 12: mod_base = OTHER; note = 2'-fluoro modified nucleotide
  modified_base 13: mod_base = OTHER; note = 2'-O-methyl modified nucleotide
  modified_base 14: mod_base = OTHER; note = 2'-fluoro modified nucleotide with phosphorothioate linkage
  modified_base 15: mod_base = OTHER; note = 2'-O-methyl modified nucleotide with phosphorothioate linkage
  modified_base 16: mod_base = OTHER; note = 2'-fluoro modified nucleotide with phosphorothioate linkage
  modified_base 17: mod_base = OTHER; note = 2'-O-methyl modified nucleotide with phosphorothioate linkage
  modified_base 18: mod_base = OTHER; note = 2'-fluoro modified nucleotide with phosphorothioate linkage
  misc_difference 19: note = 2'-O-methyl modified nucleotide may be attached to trivalent N-Acetylgalactosamine
taatgtttatactttgata

SEQ ID NO: 834 - RNA, 19 nt, synthetic construct
  source 1..19: mol_type = other RNA
  misc_difference 1: note = 2'-O-methyl modified nucleotide with phosphorothioate linkage may be modified with 5'-Phosphate
  modified_base 2: mod_base = OTHER; note = 2'-fluoro modified nucleotide with phosphorothioate linkage
  modified_base 3: mod_base = OTHER; note = 2'-O-methyl modified nucleotide
  modified_base 4: mod_base = OTHER; note = 2'-fluoro modified nucleotide
  modified_base 5: mod_base = OTHER; note = 2'-O-methyl modified nucleotide
  modified_base 6: mod_base = OTHER; note = 2'-fluoro modified nucleotide
  modified_base 7: mod_base = OTHER; note = 2'-O-methyl modified nucleotide
  modified_base 8: mod_base = OTHER; note = 2'-fluoro modified nucleotide
  modified_base 9: mod_base = OTHER; note = 2'-O-methyl modified nucleotide
  modified_base 10: mod_base = OTHER; note = 2'-fluoro modified nucleotide
  modified_base 11: mod_base = OTHER; note = 2'-O-methyl modified nucleotide
  modified_base 12: mod_base = OTHER; note = 2'-fluoro modified nucleotide
  modified_base 13: mod_base = OTHER; note = 2'-O-methyl modified nucleotide
  modified_base 14: mod_base = OTHER; note = 2'-fluoro modified nucleotide with phosphorothioate linkage
  modified_base 15: mod_base = OTHER; note = 2'-O-methyl modified nucleotide with phosphorothioate linkage
  modified_base 16: mod_base = OTHER; note = 2'-fluoro modified nucleotide with phosphorothioate linkage
  modified_base 17: mod_base = OTHER; note = 2'-O-methyl modified nucleotide with phosphorothioate linkage
  modified_base 18: mod_base = OTHER; note = 2'-fluoro modified nucleotide with phosphorothioate linkage
  misc_difference 19: note = 2'-O-methyl modified nucleotide may be attached to trivalent N-Acetylgalactosamine
tcggaatcgtacacaaagg

SEQ ID NO: 835 - RNA, 19 nt, synthetic construct
  source 1..19: mol_type = other RNA
  misc_difference 1: note = 2'-O-methyl modified nucleotide with phosphorothioate linkage may be modified with 5'-Phosphate
  modified_base 2: mod_base = OTHER; note = 2'-fluoro modified nucleotide with phosphorothioate linkage
  modified_base 3: mod_base = OTHER; note = 2'-O-methyl modified nucleotide
  modified_base 4: mod_base = OTHER; note = 2'-fluoro modified nucleotide
  modified_base 5: mod_base = OTHER; note = 2'-O-methyl modified nucleotide
  modified_base 6: mod_base = OTHER; note = 2'-fluoro modified nucleotide
  modified_base 7: mod_base = OTHER; note = 2'-O-methyl modified nucleotide
  modified_base 8: mod_base = OTHER; note = 2'-fluoro modified nucleotide
  modified_base 9: mod_base = OTHER; note = 2'-O-methyl modified nucleotide
  modified_base 10: mod_base = OTHER; note = 2'-fluoro modified nucleotide
  modified_base 11: mod_base = OTHER; note = 2'-O-methyl modified nucleotide
  modified_base 12: mod_base = OTHER; note = 2'-fluoro modified nucleotide
  modified_base 13: mod_base = OTHER; note = 2'-O-methyl modified nucleotide
  modified_base 14: mod_base = OTHER; note = 2'-fluoro modified nucleotide with phosphorothioate linkage
  modified_base 15: mod_base = OTHER; note = 2'-O-methyl modified nucleotide with phosphorothioate linkage
  modified_base 16: mod_base = OTHER; note = 2'-fluoro modified nucleotide with phosphorothioate linkage
  modified_base 17: mod_base = OTHER; note = 2'-O-methyl modified nucleotide with phosphorothioate linkage
  modified_base 18: mod_base = OTHER; note = 2'-fluoro modified nucleotide with phosphorothioate linkage
  misc_difference 19: note = 2'-O-methyl modified nucleotide may be attached to trivalent N-Acetylgalactosamine
tatacctctgctcttctga

SEQ ID NO: 836 - RNA, 19 nt, synthetic construct
  source 1..19: mol_type = other RNA
  misc_difference 1: note = 2'-O-methyl modified nucleotide with phosphorothioate linkage may be modified with 5'-Phosphate
  modified_base 2: mod_base = OTHER; note = 2'-fluoro modified nucleotide with phosphorothioate linkage
  modified_base 3: mod_base = OTHER; note = 2'-O-methyl modified nucleotide
  modified_base 4: mod_base = OTHER; note = 2'-fluoro modified nucleotide
  modified_base 5: mod_base = OTHER; note = 2'-O-methyl modified nucleotide
  modified_base 6: mod_base = OTHER; note = 2'-fluoro modified nucleotide
  modified_base 7: mod_base = OTHER; note = 2'-O-methyl modified nucleotide
  modified_base 8: mod_base = OTHER; note = 2'-fluoro modified nucleotide
  modified_base 9: mod_base = OTHER; note = 2'-O-methyl modified nucleotide
  modified_base 10: mod_base = OTHER; note = 2'-fluoro modified nucleotide
  modified_base 11: mod_base = OTHER; note = 2'-O-methyl modified nucleotide
  modified_base 12: mod_base = OTHER; note = 2'-fluoro modified nucleotide
  modified_base 13: mod_base = OTHER; note = 2'-O-methyl modified nucleotide
  modified_base 14: mod_base = OTHER; note = 2'-fluoro modified nucleotide with phosphorothioate linkage
  modified_base 15: mod_base = OTHER; note = 2'-O-methyl modified nucleotide with phosphorothioate linkage
  modified_base 16: mod_base = OTHER; note = 2'-fluoro modified nucleotide with phosphorothioate linkage
  modified_base 17: mod_base = OTHER; note = 2'-O-methyl modified nucleotide with phosphorothioate linkage
  modified_base 18: mod_base = OTHER; note = 2'-fluoro modified nucleotide with phosphorothioate linkage
  misc_difference 19: note = 2'-O-methyl modified nucleotide may be attached to trivalent N-Acetylgalactosamine
tatcaatttcttctaccat

SEQ ID NO: 837 - RNA, 19 nt, synthetic construct
  source 1..19: mol_type = other RNA
  misc_difference 1: note = 2'-O-methyl modified nucleotide with phosphorothioate linkage may be modified with 5'-Phosphate
  modified_base 2: mod_base = OTHER; note = 2'-fluoro modified nucleotide with phosphorothioate linkage
  modified_base 3: mod_base = OTHER; note = 2'-O-methyl modified nucleotide
  modified_base 4: mod_base = OTHER; note = 2'-fluoro modified nucleotide
  modified_base 5: mod_base = OTHER; note = 2'-O-methyl modified nucleotide
  modified_base 6: mod_base = OTHER; note = 2'-fluoro modified nucleotide
  modified_base 7: mod_base = OTHER; note = 2'-O-methyl modified nucleotide
  modified_base 8: mod_base = OTHER; note = 2'-fluoro modified nucleotide
  modified_base 9: mod_base = OTHER; note = 2'-O-methyl modified nucleotide
  modified_base 10: mod_base = OTHER; note = 2'-fluoro modified nucleotide
  modified_base 11: mod_base = OTHER; note = 2'-O-methyl modified nucleotide
  modified_base 12: mod_base = OTHER; note = 2'-fluoro modified nucleotide
  modified_base 13: mod_base = OTHER; note = 2'-O-methyl modified nucleotide
  modified_base 14: mod_base = OTHER; note = 2'-fluoro modified nucleotide with phosphorothioate linkage
  modified_base 15: mod_base = OTHER; note = 2'-O-methyl modified nucleotide with phosphorothioate linkage
  modified_base 16: mod_base = OTHER; note = 2'-fluoro modified nucleotide with phosphorothioate linkage
  modified_base 17: mod_base = OTHER; note = 2'-O-methyl modified nucleotide with phosphorothioate linkage
  modified_base 18: mod_base = OTHER; note = 2'-fluoro modified nucleotide with phosphorothioate linkage
  misc_difference 19: note = 2'-O-methyl modified nucleotide may be attached to trivalent N-Acetylgalactosamine
taacattgtgttttgcatt

SEQ ID NO: 838 - RNA, 19 nt, synthetic construct
  source 1..19: mol_type = other RNA
  misc_difference 1: note = 2'-O-methyl modified nucleotide with phosphorothioate linkage may be modified with 5'-Phosphate
  modified_base 2: mod_base = OTHER; note = 2'-fluoro modified nucleotide with phosphorothioate linkage
  modified_base 3: mod_base = OTHER; note = 2'-O-methyl modified nucleotide
  modified_base 4: mod_base = OTHER; note = 2'-fluoro modified nucleotide
  modified_base 5: mod_base = OTHER; note = 2'-O-methyl modified nucleotide
  modified_base 6: mod_base = OTHER; note = 2'-fluoro modified nucleotide
  modified_base 7: mod_base = OTHER; note = 2'-O-methyl modified nucleotide
  modified_base 8: mod_base = OTHER; note = 2'-fluoro modified nucleotide
  modified_base 9: mod_base = OTHER; note = 2'-O-methyl modified nucleotide
  modified_base 10: mod_base = OTHER; note = 2'-fluoro modified nucleotide
  modified_base 11: mod_base = OTHER; note = 2'-O-methyl modified nucleotide
  modified_base 12: mod_base = OTHER; note = 2'-fluoro modified nucleotide
  modified_base 13: mod_base = OTHER; note = 2'-O-methyl modified nucleotide
  modified_base 14: mod_base = OTHER; note = 2'-fluoro modified nucleotide with phosphorothioate linkage
  modified_base 15: mod_base = OTHER; note = 2'-O-methyl modified nucleotide with phosphorothioate linkage
  modified_base 16: mod_base = OTHER; note = 2'-fluoro modified nucleotide with phosphorothioate linkage
  modified_base 17: mod_base = OTHER; note = 2'-O-methyl modified nucleotide with phosphorothioate linkage
  modified_base 18: mod_base = OTHER; note = 2'-fluoro modified nucleotide with phosphorothioate linkage
  misc_difference 19: note = 2'-O-methyl modified nucleotide may be attached to trivalent N-Acetylgalactosamine
taactttataagcatatgc

SEQ ID NO: 839 - RNA, 19 nt, synthetic construct
  source 1..19: mol_type = other RNA
  misc_difference 1: note = 2'-O-methyl modified nucleotide with phosphorothioate linkage may be modified with 5'-Phosphate
  modified_base 2: mod_base = OTHER; note = 2'-fluoro modified nucleotide with phosphorothioate linkage
  modified_base 3: mod_base = OTHER; note = 2'-O-methyl modified nucleotide
  modified_base 4: mod_base = OTHER; note = 2'-fluoro modified nucleotide
  modified_base 5: mod_base = OTHER; note = 2'-O-methyl modified nucleotide
  modified_base 6: mod_base = OTHER; note = 2'-fluoro modified nucleotide
  modified_base 7: mod_base = OTHER; note = 2'-O-methyl modified nucleotide
  modified_base 8: mod_base = OTHER; note = 2'-fluoro modified nucleotide
  modified_base 9: mod_base = OTHER; note = 2'-O-methyl modified nucleotide
  modified_base 10: mod_base = OTHER; note = 2'-fluoro modified nucleotide
  modified_base 11: mod_base = OTHER; note = 2'-O-methyl modified nucleotide
  modified_base 12: mod_base = OTHER; note = 2'-fluoro modified nucleotide
  modified_base 13: mod_base = OTHER; note = 2'-O-methyl modified nucleotide
  modified_base 14: mod_base = OTHER; note = 2'-fluoro modified nucleotide with phosphorothioate linkage
  modified_base 15: mod_base = OTHER; note = 2'-O-methyl modified nucleotide with phosphorothioate linkage
  modified_base 16: mod_base = OTHER; note = 2'-fluoro modified nucleotide with phosphorothioate linkage
  modified_base 17: mod_base = OTHER; note = 2'-O-methyl modified nucleotide with phosphorothioate linkage
  modified_base 18: mod_base = OTHER; note = 2'-fluoro modified nucleotide with phosphorothioate linkage
  misc_difference 19: note = 2'-O-methyl modified nucleotide may be attached to trivalent N-Acetylgalactosamine
taggataacttttaataga

SEQ ID NO: 840 - RNA, 19 nt, synthetic construct
  source 1..19: mol_type = other RNA
  misc_difference 1: note = 2'-O-methyl modified nucleotide with phosphorothioate linkage may be modified with 5'-Phosphate
  modified_base 2: mod_base = OTHER; note = 2'-fluoro modified nucleotide with phosphorothioate linkage
  modified_base 3: mod_base = OTHER; note = 2'-O-methyl modified nucleotide
  modified_base 4: mod_base = OTHER; note = 2'-fluoro modified nucleotide
  modified_base 5: mod_base = OTHER; note = 2'-O-methyl modified nucleotide
  modified_base 6: mod_base = OTHER; note = 2'-fluoro modified nucleotide
  modified_base 7: mod_base = OTHER; note = 2'-O-methyl modified nucleotide
  modified_base 8: mod_base = OTHER; note = 2'-fluoro modified nucleotide
  modified_base 9: mod_base = OTHER; note = 2'-O-methyl modified nucleotide
  modified_base 10: mod_base = OTHER; note = 2'-fluoro modified nucleotide
  modified_base 11: mod_base = OTHER; note = 2'-O-methyl modified nucleotide
  modified_base 12: mod_base = OTHER; note = 2'-fluoro modified nucleotide
  modified_base 13: mod_base = OTHER; note = 2'-O-methyl modified nucleotide
  modified_base 14: mod_base = OTHER; note = 2'-fluoro modified nucleotide with phosphorothioate linkage
  modified_base 15: mod_base = OTHER; note = 2'-O-methyl modified nucleotide with phosphorothioate linkage
  modified_base 16: mod_base = OTHER; note = 2'-fluoro modified nucleotide with phosphorothioate linkage
  modified_base 17: mod_base = OTHER; note = 2'-O-methyl modified nucleotide with phosphorothioate linkage
  modified_base 18: mod_base = OTHER; note = 2'-fluoro modified nucleotide with phosphorothioate linkage
  misc_difference 19: note = 2'-O-methyl modified nucleotide may be attached to trivalent N-Acetylgalactosamine
ttttattggttgatactgt

SEQ ID NO: 841 - RNA, 19 nt, synthetic construct
  source 1..19: mol_type = other RNA
  misc_difference 1: note = 2'-O-methyl modified nucleotide with phosphorothioate linkage may be modified with 5'-Phosphate
  modified_base 2: mod_base = OTHER; note = 2'-fluoro modified nucleotide with phosphorothioate linkage
  modified_base 3: mod_base = OTHER; note = 2'-O-methyl modified nucleotide
  modified_base 4: mod_base = OTHER; note = 2'-fluoro modified nucleotide
  modified_base 5: mod_base = OTHER; note = 2'-O-methyl modified nucleotide
  modified_base 6: mod_base = OTHER; note = 2'-fluoro modified nucleotide
  modified_base 7: mod_base = OTHER; note = 2'-O-methyl modified nucleotide
  modified_base 8: mod_base = OTHER; note = 2'-fluoro modified nucleotide
  modified_base 9: mod_base = OTHER; note = 2'-O-methyl modified nucleotide
  modified_base 10: mod_base = OTHER; note = 2'-fluoro modified nucleotide
  modified_base 11: mod_base = OTHER; note = 2'-O-methyl modified nucleotide
  modified_base 12: mod_base = OTHER; note = 2'-fluoro modified nucleotide
  modified_base 13: mod_base = OTHER; note = 2'-O-methyl modified nucleotide
  modified_base 14: mod_base = OTHER; note = 2'-fluoro modified nucleotide with phosphorothioate linkage
  modified_base 15: mod_base = OTHER; note = 2'-O-methyl modified nucleotide with phosphorothioate linkage
  modified_base 16: mod_base = OTHER; note = 2'-fluoro modified nucleotide with phosphorothioate linkage
  modified_base 17: mod_base = OTHER; note = 2'-O-methyl modified nucleotide with phosphorothioate linkage
  modified_base 18: mod_base = OTHER; note = 2'-fluoro modified nucleotide with phosphorothioate linkage
  misc_difference 19: note = 2'-O-methyl modified nucleotide may be attached to trivalent N-Acetylgalactosamine
tgcaactgttttcttctgg

SEQ ID NO: 842 - RNA, 19 nt, synthetic construct
  source 1..19: mol_type = other RNA
  misc_difference 1: note = 2'-O-methyl modified nucleotide with phosphorothioate linkage may be modified with 5'-Phosphate
  modified_base 2: mod_base = OTHER; note = 2'-fluoro modified nucleotide with phosphorothioate linkage
  modified_base 3: mod_base = OTHER; note = 2'-O-methyl modified nucleotide
  modified_base 4: mod_base = OTHER; note = 2'-fluoro modified nucleotide
  modified_base 5: mod_base = OTHER; note = 2'-O-methyl modified nucleotide
  modified_base 6: mod_base = OTHER; note = 2'-fluoro modified nucleotide
  modified_base 7: mod_base = OTHER; note = 2'-O-methyl modified nucleotide
  modified_base 8: mod_base = OTHER; note = 2'-fluoro modified nucleotide
  modified_base 9: mod_base = OTHER; note = 2'-O-methyl modified nucleotide
  modified_base 10: mod_base = OTHER; note = 2'-fluoro modified nucleotide
  modified_base 11: mod_base = OTHER; note = 2'-O-methyl modified nucleotide
  modified_base 12: mod_base = OTHER; note = 2'-fluoro modified nucleotide
  modified_base 13: mod_base = OTHER; note = 2'-O-methyl modified nucleotide
  modified_base 14: mod_base = OTHER; note = 2'-fluoro modified nucleotide with phosphorothioate linkage
  modified_base 15: mod_base = OTHER; note = 2'-O-methyl modified nucleotide with phosphorothioate linkage
  modified_base 16: mod_base = OTHER; note = 2'-fluoro modified nucleotide with phosphorothioate linkage
  modified_base 17: mod_base = OTHER; note = 2'-O-methyl modified nucleotide with phosphorothioate linkage
  modified_base 18: mod_base = OTHER; note = 2'-fluoro modified nucleotide with phosphorothioate linkage
  misc_difference 19: note = 2'-O-methyl modified nucleotide may be attached to trivalent N-Acetylgalactosamine
tgctttgatacaacttcca

SEQ ID NO: 843 - RNA, 19 nt, synthetic construct
  source 1..19: mol_type = other RNA
  misc_difference 1: note = 2'-O-methyl modified nucleotide with phosphorothioate linkage may be modified with 5'-Phosphate
  modified_base 2: mod_base = OTHER; note = 2'-fluoro modified nucleotide with phosphorothioate linkage
  modified_base 3: mod_base = OTHER; note = 2'-O-methyl modified nucleotide
  modified_base 4: mod_base = OTHER; note = 2'-fluoro modified nucleotide
  modified_base 5: mod_base = OTHER; note = 2'-O-methyl modified nucleotide
  modified_base 6: mod_base = OTHER; note = 2'-fluoro modified nucleotide
  modified_base 7: mod_base = OTHER; note = 2'-O-methyl modified nucleotide
  modified_base 8: mod_base = OTHER; note = 2'-fluoro modified nucleotide
  modified_base 9: mod_base = OTHER; note = 2'-O-methyl modified nucleotide
  modified_base 10: mod_base = OTHER; note = 2'-fluoro modified nucleotide
  modified_base 11: mod_base = OTHER; note = 2'-O-methyl modified nucleotide
  modified_base 12: mod_base = OTHER; note = 2'-fluoro modified nucleotide
  modified_base 13: mod_base = OTHER; note = 2'-O-methyl modified nucleotide
  modified_base 14: mod_base = OTHER; note = 2'-fluoro modified nucleotide with phosphorothioate linkage
  modified_base 15: mod_base = OTHER; note = 2'-O-methyl modified nucleotide with phosphorothioate linkage
  modified_base 16: mod_base = OTHER; note = 2'-fluoro modified nucleotide with phosphorothioate linkage
  modified_base 17: mod_base = OTHER; note = 2'-O-methyl modified nucleotide with phosphorothioate linkage
  modified_base 18: mod_base = OTHER; note = 2'-fluoro modified nucleotide with phosphorothioate linkage
  misc_difference 19: note = 2'-O-methyl modified nucleotide may be attached to trivalent N-Acetylgalactosamine
tcaaagcttctctcttcaa

SEQ ID NO: 844 - RNA, 19 nt, synthetic construct
  source 1..19: mol_type = other RNA
  misc_difference 1: note = 2'-O-methyl modified nucleotide with phosphorothioate linkage may be modified with 5'-Phosphate
  modified_base 2: mod_base = OTHER; note = 2'-fluoro modified nucleotide with phosphorothioate linkage
  modified_base 3: mod_base = OTHER; note = 2'-O-methyl modified nucleotide
  modified_base 4: mod_base = OTHER; note = 2'-fluoro modified nucleotide
  modified_base 5: mod_base = OTHER; note = 2'-O-methyl modified nucleotide
  modified_base 6: mod_base = OTHER; note = 2'-fluoro modified nucleotide
  modified_base 7: mod_base = OTHER; note = 2'-O-methyl modified nucleotide
  modified_base 8: mod_base = OTHER; note = 2'-fluoro modified nucleotide
  modified_base 9: mod_base = OTHER; note = 2'-O-methyl modified nucleotide
  modified_base 10: mod_base = OTHER; note = 2'-fluoro modified nucleotide
  modified_base 11: mod_base = OTHER; note = 2'-O-methyl modified nucleotide
  modified_base 12: mod_base = OTHER; note = 2'-fluoro modified nucleotide
  modified_base 13: mod_base = OTHER; note = 2'-O-methyl modified nucleotide
  modified_base 14: mod_base = OTHER; note = 2'-fluoro modified nucleotide with phosphorothioate linkage
  modified_base 15: mod_base = OTHER; note = 2'-O-methyl modified nucleotide with phosphorothioate linkage
  modified_base 16: mod_base = OTHER; note = 2'-fluoro modified nucleotide with phosphorothioate linkage
  modified_base 17: mod_base = OTHER; note = 2'-O-methyl modified nucleotide with phosphorothioate linkage
  modified_base 18: mod_base = OTHER; note = 2'-fluoro modified nucleotide with phosphorothioate linkage
  misc_difference 19: note = 2'-O-methyl modified nucleotide may be attached to trivalent N-Acetylgalactosamine
tggaactcctttcgtctgc

SEQ ID NO: 845 - RNA, 19 nt, synthetic construct
  source 1..19: mol_type = other RNA
  misc_difference 1: note = 2'-O-methyl modified nucleotide with phosphorothioate linkage may be modified with 5'-Phosphate
  modified_base 2: mod_base = OTHER; note = 2'-fluoro modified nucleotide with phosphorothioate linkage
  modified_base 3: mod_base = OTHER; note = 2'-O-methyl modified nucleotide
  modified_base 4: mod_base = OTHER; note = 2'-fluoro modified nucleotide
  modified_base 5: mod_base = OTHER; note = 2'-O-methyl modified nucleotide
  modified_base 6: mod_base = OTHER; note = 2'-fluoro modified nucleotide
  modified_base 7: mod_base = OTHER; note = 2'-O-methyl modified nucleotide
  modified_base 8: mod_base = OTHER; note = 2'-fluoro modified nucleotide
  modified_base 9: mod_base = OTHER; note = 2'-O-methyl modified nucleotide
  modified_base 10: mod_base = OTHER; note = 2'-fluoro modified nucleotide
  modified_base 11: mod_base = OTHER; note = 2'-O-methyl modified nucleotide
  modified_base 12: mod_base = OTHER; note = 2'-fluoro modified nucleotide
  modified_base 13: mod_base = OTHER; note = 2'-O-methyl modified nucleotide
  modified_base 14: mod_base = OTHER; note = 2'-fluoro modified nucleotide with phosphorothioate linkage
  modified_base 15: mod_base = OTHER; note = 2'-O-methyl modified nucleotide with phosphorothioate linkage
  modified_base 16: mod_base = OTHER; note = 2'-fluoro modified nucleotide with phosphorothioate linkage
  modified_base 17: mod_base = OTHER; note = 2'-O-methyl modified nucleotide with phosphorothioate linkage
  modified_base 18: mod_base = OTHER; note = 2'-fluoro modified nucleotide with phosphorothioate linkage
  misc_difference 19: note = 2'-O-methyl modified nucleotide may be attached to trivalent N-Acetylgalactosamine
tatgacagttctttgactg

SEQ ID NO: 846 - RNA, 19 nt, synthetic construct
  source 1..19: mol_type = other RNA
  misc_difference 1: note = 2'-O-methyl modified nucleotide with phosphorothioate linkage may be modified with 5'-Phosphate
  modified_base 2: mod_base = OTHER; note = 2'-fluoro modified nucleotide with phosphorothioate linkage
  modified_base 3: mod_base = OTHER; note = 2'-O-methyl modified nucleotide
  modified_base 4: mod_base = OTHER; note = 2'-fluoro modified nucleotide
  modified_base 5: mod_base = OTHER; note = 2'-O-methyl modified nucleotide
  modified_base 6: mod_base = OTHER; note = 2'-fluoro modified nucleotide
  modified_base 7: mod_base = OTHER; note = 2'-O-methyl modified nucleotide
  modified_base 8: mod_base = OTHER; note = 2'-fluoro modified nucleotide
  modified_base 9: mod_base = OTHER; note = 2'-O-methyl modified nucleotide
  modified_base 10: mod_base = OTHER; note = 2'-fluoro modified nucleotide
  modified_base 11: mod_base = OTHER; note = 2'-O-methyl modified nucleotide
  modified_base 12: mod_base = OTHER; note = 2'-fluoro modified nucleotide
  modified_base 13: mod_base = OTHER; note = 2'-O-methyl modified nucleotide
  modified_base 14: mod_base = OTHER; note = 2'-fluoro modified nucleotide with phosphorothioate linkage
  modified_base 15: mod_base = OTHER; note = 2'-O-methyl modified nucleotide with phosphorothioate linkage
  modified_base 16: mod_base = OTHER; note = 2'-fluoro modified nucleotide with phosphorothioate linkage
  modified_base 17: mod_base = OTHER; note = 2'-O-methyl modified nucleotide with phosphorothioate linkage
  modified_base 18: mod_base = OTHER; note = 2'-fluoro modified nucleotide with phosphorothioate linkage
  misc_difference 19: note = 2'-O-methyl modified nucleotide may be attached to trivalent N-Acetylgalactosamine
ttgcagaataacatgtcca

SEQ ID NO: 847 - RNA, 19 nt, synthetic construct
  source 1..19: mol_type = other RNA
  misc_difference 1: note = 2'-O-methyl modified nucleotide with phosphorothioate linkage may be modified with 5'-Phosphate
  modified_base 2: mod_base = OTHER; note = 2'-fluoro modified nucleotide with phosphorothioate linkage
  modified_base 3: mod_base = OTHER; note = 2'-O-methyl modified nucleotide
  modified_base 4: mod_base = OTHER; note = 2'-fluoro modified nucleotide
  modified_base 5: mod_base = OTHER; note = 2'-O-methyl modified nucleotide
  modified_base 6: mod_base = OTHER; note = 2'-fluoro modified nucleotide
  modified_base 7: mod_base = OTHER; note = 2'-O-methyl modified nucleotide
  modified_base 8: mod_base = OTHER; note = 2'-fluoro modified nucleotide
  modified_base 9: mod_base = OTHER; note = 2'-O-methyl modified nucleotide
  modified_base 10: mod_base = OTHER; note = 2'-fluoro modified nucleotide
  modified_base 11: mod_base = OTHER; note = 2'-O-methyl modified nucleotide
  modified_base 12: mod_base = OTHER; note = 2'-fluoro modified nucleotide
  modified_base 13: mod_base = OTHER; note = 2'-O-methyl modified nucleotide
  modified_base 14: mod_base = OTHER; note = 2'-fluoro modified nucleotide with phosphorothioate linkage
  modified_base 15: mod_base = OTHER; note = 2'-O-methyl modified nucleotide with phosphorothioate linkage
  modified_base 16: mod_base = OTHER; note = 2'-fluoro modified nucleotide with phosphorothioate linkage
  modified_base 17: mod_base = OTHER; note = 2'-O-methyl modified nucleotide with phosphorothioate linkage
  modified_base 18: mod_base = OTHER; note = 2'-fluoro modified nucleotide with phosphorothioate linkage
  misc_difference 19: note = 2'-O-methyl modified nucleotide may be attached to trivalent N-Acetylgalactosamine
tagaagtcctatagttgta

SEQ ID NO: 848 - RNA, 19 nt, synthetic construct
  source 1..19: mol_type = other RNA
  misc_difference 1: note = 2'-O-methyl modified nucleotide with phosphorothioate linkage may be modified with 5'-Phosphate
  modified_base 2: mod_base = OTHER; note = 2'-fluoro modified nucleotide with phosphorothioate linkage
  modified_base 3: mod_base = OTHER; note = 2'-O-methyl modified nucleotide
  modified_base 4: mod_base = OTHER; note = 2'-fluoro modified nucleotide
  modified_base 5: mod_base = OTHER; note = 2'-O-methyl modified nucleotide
  modified_base 6: mod_base = OTHER; note = 2'-fluoro modified nucleotide
  modified_base 7: mod_base = OTHER; note = 2'-O-methyl modified nucleotide
  modified_base 8: mod_base = OTHER; note = 2'-fluoro modified nucleotide
  modified_base 9: mod_base = OTHER; note = 2'-O-methyl modified nucleotide
  modified_base 10: mod_base = OTHER; note = 2'-fluoro modified nucleotide
  modified_base 11: mod_base = OTHER; note = 2'-O-methyl modified nucleotide
  modified_base 12: mod_base = OTHER; note = 2'-fluoro modified nucleotide
  modified_base 13: mod_base = OTHER; note = 2'-O-methyl modified nucleotide
  modified_base 14: mod_base = OTHER; note = 2'-fluoro modified nucleotide with phosphorothioate linkage
  modified_base 15: mod_base = OTHER; note = 2'-O-methyl modified nucleotide with phosphorothioate linkage
  modified_base 16: mod_base = OTHER; note = 2'-fluoro modified nucleotide with phosphorothioate linkage
  modified_base 17: mod_base = OTHER; note = 2'-O-methyl modified nucleotide with phosphorothioate linkage
  modified_base 18: mod_base = OTHER; note = 2'-fluoro modified nucleotide with phosphorothioate linkage
  misc_difference 19: note = 2'-O-methyl modified nucleotide may be attached to trivalent N-Acetylgalactosamine
tataacttttaatagagat

SEQ ID NO: 849 - RNA, 19 nt, synthetic construct
  source 1..19: mol_type = other RNA
  misc_difference 1: note = 2'-O-methyl modified nucleotide with phosphorothioate linkage may be modified with 5'-Phosphate
  modified_base 2: mod_base = OTHER; note = 2'-fluoro modified nucleotide with phosphorothioate linkage
  modified_base 3: mod_base = OTHER; note = 2'-O-methyl modified nucleotide
  modified_base 4: mod_base = OTHER; note = 2'-fluoro modified nucleotide
  modified_base 5: mod_base = OTHER; note = 2'-O-methyl modified nucleotide
  modified_base 6: mod_base = OTHER; note = 2'-fluoro modified nucleotide
  modified_base 7: mod_base = OTHER; note = 2'-O-methyl modified nucleotide
  modified_base 8: mod_base = OTHER; note = 2'-fluoro modified nucleotide
  modified_base 9: mod_base = OTHER; note = 2'-O-methyl modified nucleotide
  modified_base 10: mod_base = OTHER; note = 2'-fluoro modified nucleotide
  modified_base 11: mod_base = OTHER; note = 2'-O-methyl modified nucleotide
  modified_base 12: mod_base = OTHER; note = 2'-fluoro modified nucleotide
  modified_base 13: mod_base = OTHER; note = 2'-O-methyl modified nucleotide
  modified_base 14: mod_base = OTHER; note = 2'-fluoro modified nucleotide with phosphorothioate linkage
  modified_base 15: mod_base = OTHER; note = 2'-O-methyl modified nucleotide with phosphorothioate linkage
  modified_base 16: mod_base = OTHER; note = 2'-fluoro modified nucleotide with phosphorothioate linkage
  modified_base 17: mod_base = OTHER; note = 2'-O-methyl modified nucleotide with phosphorothioate linkage
  modified_base 18: mod_base = OTHER; note = 2'-fluoro modified nucleotide with phosphorothioate linkage
  misc_difference 19: note = 2'-O-methyl modified nucleotide may be attached to trivalent N-Acetylgalactosamine
tctaagatttcttttccaa

SEQ ID NO: 850 - RNA, 19 nt, synthetic construct
  source 1..19: mol_type = other RNA
  misc_difference 1: note = 2'-O-methyl modified nucleotide with phosphorothioate linkage may be modified with 5'-Phosphate
  modified_base 2: mod_base = OTHER; note = 2'-fluoro modified nucleotide with phosphorothioate linkage
  modified_base 3: mod_base = OTHER; note = 2'-O-methyl modified nucleotide
  modified_base 4: mod_base = OTHER; note = 2'-fluoro modified nucleotide
  modified_base 5: mod_base = OTHER; note = 2'-O-methyl modified nucleotide
  modified_base 6: mod_base = OTHER; note = 2'-fluoro modified nucleotide
  modified_base 7: mod_base = OTHER; note = 2'-O-methyl modified nucleotide
  modified_base 8: mod_base = OTHER; note = 2'-fluoro modified nucleotide
  modified_base 9: mod_base = OTHER; note = 2'-O-methyl modified nucleotide
  modified_base 10: mod_base = OTHER; note = 2'-fluoro modified nucleotide
  modified_base 11: mod_base = OTHER; note = 2'-O-methyl modified nucleotide
  modified_base 12: mod_base = OTHER; note = 2'-fluoro modified nucleotide
  modified_base 13: mod_base = OTHER; note = 2'-O-methyl modified nucleotide
  modified_base 14: mod_base = OTHER; note = 2'-fluoro modified nucleotide with phosphorothioate linkage
  modified_base 15: mod_base = OTHER; note = 2'-O-methyl modified nucleotide with phosphorothioate linkage
  modified_base 16: mod_base = OTHER; note = 2'-fluoro modified nucleotide with phosphorothioate linkage
  modified_base 17: mod_base = OTHER; note = 2'-O-methyl modified nucleotide with phosphorothioate linkage
  modified_base 18: mod_base = OTHER; note = 2'-fluoro modified nucleotide with phosphorothioate linkage
  misc_difference 19: note = 2'-O-methyl modified nucleotide may be attached to trivalent N-Acetylgalactosamine
tataaatgaacatggcctg

SEQ ID NO: 851 - RNA, 15 nt, synthetic construct
  source 1..15: mol_type = other RNA
  modified_base 1: mod_base = OTHER; note = 2'-fluoro modified nucleotide with phosphorothioate linkage
  modified_base 2: mod_base = OTHER; note = 2'-O-methyl modified nucleotide with phosphorothioate linkage
  modified_base 3: mod_base = OTHER; note = 2'-fluoro modified nucleotide
  modified_base 4: mod_base = OTHER; note = 2'-O-methyl modified nucleotide
  modified_base 5: mod_base = OTHER; note = 2'-fluoro modified nucleotide
  modified_base 6: mod_base = OTHER; note = 2'-O-methyl modified nucleotide
  modified_base 7: mod_base = OTHER; note = 2'-fluoro modified nucleotide
  modified_base 8: mod_base = OTHER; note = 2'-O-methyl modified nucleotide
  modified_base 9: mod_base = OTHER; note = 2'-fluoro modified nucleotide
  modified_base 10: mod_base = OTHER; note = 2'-O-methyl modified nucleotide
  modified_base 11: mod_base = OTHER; note = 2'-fluoro modified nucleotide
  modified_base 12: mod_base = OTHER; note = 2'-O-methyl modified nucleotide
  modified_base 13: mod_base = OTHER; note = 2'-fluoro modified nucleotide with phosphorothioate linkage
  modified_base 14: mod_base = OTHER; note = 2'-O-methyl modified nucleotide with phosphorothioate linkage
  misc_difference 15: note = 2'-fluoro modified nucleotide may be attached to trivalent N-Acetylgalactosamine
caggccaaactgtga

SEQ ID NO: 852 - RNA, 15 nt, synthetic construct
  source 1..15: mol_type = other RNA
  modified_base 1: mod_base = OTHER; note = 2'-fluoro modified nucleotide with phosphorothioate linkage
  modified_base 2: mod_base = OTHER; note = 2'-O-methyl modified nucleotide with phosphorothioate linkage
  modified_base 3: mod_base = OTHER; note = 2'-fluoro modified nucleotide
  modified_base 4: mod_base = OTHER; note = 2'-O-methyl modified nucleotide
  modified_base 5: mod_base = OTHER; note = 2'-fluoro modified nucleotide
  modified_base 6: mod_base = OTHER; note = 2'-O-methyl modified nucleotide
  modified_base 7: mod_base = OTHER; note = 2'-fluoro modified nucleotide
  modified_base 8: mod_base = OTHER; note = 2'-O-methyl modified nucleotide
  modified_base 9: mod_base = OTHER; note = 2'-fluoro modified nucleotide
  modified_base 10: mod_base = OTHER; note = 2'-O-methyl modified nucleotide
  modified_base 11: mod_base = OTHER; note = 2'-fluoro modified nucleotide
  modified_base 12: mod_base = OTHER; note = 2'-O-methyl modified nucleotide
  modified_base 13: mod_base = OTHER; note = 2'-fluoro modified nucleotide with phosphorothioate linkage
  modified_base 14: mod_base = OTHER; note = 2'-O-methyl modified nucleotide with phosphorothioate linkage
  misc_difference 15: note = 2'-fluoro modified nucleotide may be attached to trivalent N-Acetylgalactosamine
tgacttcaagattca

SEQ ID NO: 853 - RNA, 15 nt, synthetic construct
  source 1..15: mol_type = other RNA
  modified_base 1: mod_base = OTHER; note = 2'-fluoro modified nucleotide with phosphorothioate linkage
  modified_base 2: mod_base = OTHER; note = 2'-O-methyl modified nucleotide with phosphorothioate linkage
  modified_base 3: mod_base = OTHER; note = 2'-fluoro modified nucleotide
  modified_base 4: mod_base = OTHER; note = 2'-O-methyl modified nucleotide
  modified_base 5: mod_base = OTHER; note = 2'-fluoro modified nucleotide
  modified_base 6: mod_base = OTHER; note = 2'-O-methyl modified nucleotide
  modified_base 7: mod_base = OTHER; note = 2'-fluoro modified nucleotide
  modified_base 8: mod_base = OTHER; note = 2'-O-methyl modified nucleotide
  modified_base 9: mod_base = OTHER; note = 2'-fluoro modified nucleotide
  modified_base 10: mod_base = OTHER; note = 2'-O-methyl modified nucleotide
  modified_base 11: mod_base = OTHER; note = 2'-fluoro modified nucleotide
  modified_base 12: mod_base = OTHER; note = 2'-O-methyl modified nucleotide
  modified_base 13: mod_base = OTHER; note = 2'-fluoro modified nucleotide with phosphorothioate linkage
  modified_base 14: mod_base = OTHER; note = 2'-O-methyl modified nucleotide with phosphorothioate linkage
  misc_difference 15: note = 2'-fluoro modified nucleotide may be attached to trivalent N-Acetylgalactosamine
cagctacaagcccaa

SEQ ID NO: 854 - RNA, 15 nt, synthetic construct
  source 1..15: mol_type = other RNA
  modified_base 1: mod_base = OTHER; note = 2'-fluoro modified nucleotide with phosphorothioate linkage
  modified_base 2: mod_base = OTHER; note = 2'-O-methyl modified nucleotide with phosphorothioate linkage
  modified_base 3: mod_base = OTHER; note = 2'-fluoro modified nucleotide
  modified_base 4: mod_base = OTHER; note = 2'-O-methyl modified nucleotide
  modified_base 5: mod_base = OTHER; note = 2'-fluoro modified nucleotide
  modified_base 6: mod_base = OTHER; note = 2'-O-methyl modified nucleotide
  modified_base 7: mod_base = OTHER; note = 2'-fluoro modified nucleotide
  modified_base 8: mod_base = OTHER; note = 2'-O-methyl modified nucleotide
  modified_base 9: mod_base = OTHER; note = 2'-fluoro modified nucleotide
  modified_base 10: mod_base = OTHER; note = 2'-O-methyl modified nucleotide
  modified_base 11: mod_base = OTHER; note = 2'-fluoro modified nucleotide
  modified_base 12: mod_base = OTHER; note = 2'-O-methyl modified nucleotide
  modified_base 13: mod_base = OTHER; note = 2'-fluoro modified nucleotide with phosphorothioate linkage
  modified_base 14: mod_base = OTHER; note = 2'-O-methyl modified nucleotide with phosphorothioate linkage
  misc_difference 15: note = 2'-fluoro modified nucleotide may be attached to trivalent N-Acetylgalactosamine
actataattacttga

SEQ ID NO: 855 - RNA, 15 nt, synthetic construct
  source 1..15: mol_type = other RNA
  modified_base 1: mod_base = OTHER; note = 2'-fluoro modified nucleotide with phosphorothioate linkage
  modified_base 2: mod_base = OTHER; note = 2'-O-methyl modified nucleotide with phosphorothioate linkage
  modified_base 3: mod_base = OTHER; note = 2'-fluoro modified nucleotide
  modified_base 4: mod_base = OTHER; note = 2'-O-methyl modified nucleotide
  modified_base 5: mod_base = OTHER; note = 2'-fluoro modified nucleotide
  modified_base 6: mod_base = OTHER; note = 2'-O-methyl modified nucleotide
  modified_base 7: mod_base = OTHER; note = 2'-fluoro modified nucleotide
  modified_base 8: mod_base = OTHER; note = 2'-O-methyl modified nucleotide
  modified_base 9: mod_base = OTHER; note = 2'-fluoro modified nucleotide
  modified_base 10: mod_base = OTHER; note = 2'-O-methyl modified nucleotide
  modified_base 11: mod_base = OTHER; note = 2'-fluoro modified nucleotide
  modified_base 12: mod_base = OTHER; note = 2'-O-methyl modified nucleotide
  modified_base 13: mod_base = OTHER; note = 2'-fluoro modified nucleotide with phosphorothioate linkage
  modified_base 14: mod_base = OTHER; note = 2'-O-methyl modified nucleotide with phosphorothioate linkage
  misc_difference 15: note = 2'-fluoro modified nucleotide may be attached to trivalent N-Acetylgalactosamine
cagacaaacctgtta

SEQ ID NO: 856 - RNA, 15 nt, synthetic construct
  source 1..15: mol_type = other RNA
  modified_base 1: mod_base = OTHER; note = 2'-fluoro modified nucleotide with phosphorothioate linkage
  modified_base 2: mod_base = OTHER; note = 2'-O-methyl modified nucleotide with phosphorothioate linkage
  modified_base 3: mod_base = OTHER; note = 2'-fluoro modified nucleotide
  modified_base 4: mod_base = OTHER; note = 2'-O-methyl modified nucleotide
  modified_base 5: mod_base = OTHER; note = 2'-fluoro modified nucleotide
  modified_base 6: mod_base = OTHER; note = 2'-O-methyl modified nucleotide
  modified_base 7: mod_base = OTHER; note = 2'-fluoro modified nucleotide
  modified_base 8: mod_base = OTHER; note = 2'-O-methyl modified nucleotide
  modified_base 9: mod_base = OTHER; note = 2'-fluoro modified nucleotide
  modified_base 10: mod_base = OTHER; note = 2'-O-methyl modified nucleotide
  modified_base 11: mod_base = OTHER; note = 2'-fluoro modified nucleotide
  modified_base 12: mod_base = OTHER; note = 2'-O-methyl modified nucleotide
  modified_base 13: mod_base = OTHER; note = 2'-fluoro modified nucleotide with phosphorothioate linkage
  modified_base 14: mod_base = OTHER; note = 2'-O-methyl modified nucleotide with phosphorothioate linkage
  misc_difference 15: note = 2'-fluoro modified nucleotide may be attached to trivalent N-Acetylgalactosamine
tgttaaaatgtctga

SEQ ID NO: 857 - RNA, 15 nt, synthetic construct
  source 1..15: mol_type = other RNA
  modified_base 1: mod_base = OTHER; note = 2'-fluoro modified nucleotide with phosphorothioate linkage
  modified_base 2: mod_base = OTHER; note = 2'-O-methyl modified nucleotide with phosphorothioate linkage
  modified_base 3: mod_base = OTHER; note = 2'-fluoro modified nucleotide
  modified_base 4: mod_base = OTHER; note = 2'-O-methyl modified nucleotide
  modified_base 5: mod_base = OTHER; note = 2'-fluoro modified nucleotide
  modified_base 6: mod_base = OTHER; note = 2'-O-methyl modified nucleotide
  modified_base 7: mod_base = OTHER; note = 2'-fluoro modified nucleotide
  modified_base 8: mod_base = OTHER; note = 2'-O-methyl modified nucleotide
  modified_base 9: mod_base = OTHER; note = 2'-fluoro modified nucleotide
  modified_base 10: mod_base = OTHER; note = 2'-O-methyl modified nucleotide
  modified_base 11: mod_base = OTHER; note = 2'-fluoro modified nucleotide
  modified_base 12: mod_base = OTHER; note = 2'-O-methyl modified nucleotide
  modified_base 13: mod_base = OTHER; note = 2'-fluoro modified nucleotide with phosphorothioate linkage
  modified_base 14: mod_base = OTHER; note = 2'-O-methyl modified nucleotide with phosphorothioate linkage
  misc_difference 15: note = 2'-fluoro modified nucleotide may be attached to trivalent N-Acetylgalactosamine
caaccagctccagga

SEQ ID NO: 858 - RNA, 15 nt, synthetic construct
  source 1..15: mol_type = other RNA
  modified_base 1: mod_base = OTHER; note = 2'-fluoro modified nucleotide with phosphorothioate linkage
  modified_base 2: mod_base = OTHER; note = 2'-O-methyl modified nucleotide with phosphorothioate linkage
  modified_base 3: mod_base = OTHER; note = 2'-fluoro modified nucleotide
  modified_base 4: mod_base = OTHER; note = 2'-O-methyl modified nucleotide
  modified_base 5: mod_base = OTHER; note = 2'-fluoro modified nucleotide
  modified_base 6: mod_base = OTHER; note = 2'-O-methyl modified nucleotide
  modified_base 7: mod_base = OTHER; note = 2'-fluoro modified nucleotide
  modified_base 8: mod_base = OTHER; note = 2'-O-methyl modified nucleotide
  modified_base 9: mod_base = OTHER; note = 2'-fluoro modified nucleotide
  modified_base 10: mod_base = OTHER; note = 2'-O-methyl modified nucleotide
  modified_base 11: mod_base = OTHER; note = 2'-fluoro modified nucleotide
  modified_base 12: mod_base = OTHER; note = 2'-O-methyl modified nucleotide
  modified_base 13: mod_base = OTHER; note = 2'-fluoro modified nucleotide with phosphorothioate linkage
  modified_base 14: mod_base = OTHER; note = 2'-O-methyl modified nucleotide with phosphorothioate linkage
  misc_difference 15: note = 2'-fluoro modified nucleotide may be attached to trivalent N-Acetylgalactosamine
ttacttgattttata

SEQ ID NO: 859 - RNA, 15 nt, synthetic construct
  source 1..15: mol_type = other RNA
  modified_base 1: mod_base = OTHER; note = 2'-fluoro modified nucleotide with phosphorothioate linkage
  modified_base 2: mod_base = OTHER; note = 2'-O-methyl modified nucleotide with phosphorothioate linkage
  modified_base 3: mod_base = OTHER; note = 2'-fluoro modified nucleotide
  modified_base 4: mod_base = OTHER; note = 2'-O-methyl modified nucleotide
  modified_base 5: mod_base = OTHER; note = 2'-fluoro modified nucleotide
  modified_base 6: mod_base = OTHER; note = 2'-O-methyl modified nucleotide
  modified_base 7: mod_base = OTHER; note = 2'-fluoro modified nucleotide
  modified_base 8: mod_base = OTHER; note = 2'-O-methyl modified nucleotide
  modified_base 9: mod_base = OTHER; note = 2'-fluoro modified nucleotide
  modified_base 10: mod_base = OTHER; note = 2'-O-methyl modified nucleotide
  modified_base 11: mod_base = OTHER; note = 2'-fluoro modified nucleotide
  modified_base 12: mod_base = OTHER; note = 2'-O-methyl modified nucleotide
  modified_base 13: mod_base = OTHER; note = 2'-fluoro modified nucleotide with phosphorothioate linkage
  modified_base 14: mod_base = OTHER; note = 2'-O-methyl modified nucleotide with phosphorothioate linkage
  misc_difference 15: note = 2'-fluoro modified nucleotide may be attached to trivalent N-Acetylgalactosamine
aggccaaactgtgta

SEQ ID NO: 860 - RNA, 15 nt, synthetic construct
  source 1..15: mol_type = other RNA
  modified_base 1: mod_base = OTHER; note = 2'-fluoro modified nucleotide with phosphorothioate linkage
  modified_base 2: mod_base = OTHER; note = 2'-O-methyl modified nucleotide with phosphorothioate linkage
  modified_base 3: mod_base = OTHER; note = 2'-fluoro modified nucleotide
  modified_base 4: mod_base = OTHER; note = 2'-O-methyl modified nucleotide
  modified_base 5: mod_base = OTHER; note = 2'-fluoro modified nucleotide
  modified_base 6: mod_base = OTHER; note = 2'-O-methyl modified nucleotide
  modified_base 7: mod_base = OTHER; note = 2'-fluoro modified nucleotide
  modified_base 8: mod_base = OTHER; note = 2'-O-methyl modified nucleotide
  modified_base 9: mod_base = OTHER; note = 2'-fluoro modified nucleotide
  modified_base 10: mod_base = OTHER; note = 2'-O-methyl modified nucleotide
  modified_base 11: mod_base = OTHER; note = 2'-fluoro modified nucleotide
  modified_base 12: mod_base = OTHER; note = 2'-O-methyl modified nucleotide
  modified_base 13: mod_base = OTHER; note = 2'-fluoro modified nucleotide with phosphorothioate linkage
  modified_base 14: mod_base = OTHER; note = 2'-O-methyl modified nucleotide with phosphorothioate linkage
  misc_difference 15: note = 2'-fluoro modified nucleotide may be attached to trivalent N-Acetylgalactosamine
gacttcaagattcca

SEQ ID NO: 861 - RNA, 15 nt, synthetic construct
  source 1..15: mol_type = other RNA
  modified_base 1: mod_base = OTHER; note = 2'-fluoro modified nucleotide with phosphorothioate linkage
  modified_base 2: mod_base = OTHER; note = 2'-O-methyl modified nucleotide with phosphorothioate linkage
  modified_base 3: mod_base = OTHER; note = 2'-fluoro modified nucleotide
  modified_base 4: mod_base = OTHER; note = 2'-O-methyl modified nucleotide
  modified_base 5: mod_base = OTHER; note = 2'-fluoro modified nucleotide
  modified_base 6: mod_base = OTHER; note = 2'-O-methyl modified nucleotide
  modified_base 7: mod_base = OTHER; note = 2'-fluoro modified nucleotide
  modified_base 8: mod_base = OTHER; note = 2'-O-methyl modified nucleotide
  modified_base 9: mod_base = OTHER; note = 2'-fluoro modified nucleotide
  modified_base 10: mod_base = OTHER; note = 2'-O-methyl modified nucleotide
  modified_base 11: mod_base = OTHER; note = 2'-fluoro modified nucleotide
  modified_base 12: mod_base = OTHER; note = 2'-O-methyl modified nucleotide
  modified_base 13: mod_base = OTHER; note = 2'-fluoro modified nucleotide with phosphorothioate linkage
  modified_base 14: mod_base = OTHER; note = 2'-O-methyl modified nucleotide with phosphorothioate linkage
  misc_difference 15: note = 2'-fluoro modified nucleotide may be attached to trivalent N-Acetylgalactosamine
tgtgttaaaatgtca

SEQ ID NO: 862 - RNA, 15 nt, synthetic construct
  source 1..15: mol_type = other RNA
  modified_base 1: mod_base = OTHER; note = 2'-fluoro modified nucleotide with phosphorothioate linkage
  modified_base 2: mod_base = OTHER; note = 2'-O-methyl modified nucleotide with phosphorothioate linkage
  modified_base 3: mod_base = OTHER; note = 2'-fluoro modified nucleotide
  modified_base 4: mod_base = OTHER; note = 2'-O-methyl modified nucleotide
  modified_base 5: mod_base = OTHER; note = 2'-fluoro modified nucleotide
  modified_base 6: mod_base = OTHER; note = 2'-O-methyl modified nucleotide
  modified_base 7: mod_base = OTHER; note = 2'-fluoro modified nucleotide
  modified_base 8: mod_base = OTHER; note = 2'-O-methyl modified nucleotide
  modified_base 9: mod_base = OTHER; note = 2'-fluoro modified nucleotide
  modified_base 10: mod_base = OTHER; note = 2'-O-methyl modified nucleotide
  modified_base 11: mod_base = OTHER; note = 2'-fluoro modified nucleotide
  modified_base 12: mod_base = OTHER; note = 2'-O-methyl modified nucleotide
  modified_base 13: mod_base = OTHER; note = 2'-fluoro modified nucleotide with phosphorothioate linkage
  modified_base 14: mod_base = OTHER; note = 2'-O-methyl modified nucleotide with phosphorothioate linkage
  misc_difference 15: note = 2'-fluoro modified nucleotide may be attached to trivalent N-Acetylgalactosamine
cttttcctgacttca

SEQ ID NO: 863 - RNA, 15 nt, synthetic construct
  source 1..15: mol_type = other RNA
  modified_base 1: mod_base = OTHER; note = 2'-fluoro modified nucleotide with phosphorothioate linkage
  modified_base 2: mod_base = OTHER; note = 2'-O-methyl modified nucleotide with phosphorothioate linkage
  modified_base 3: mod_base = OTHER; note = 2'-fluoro modified nucleotide
  modified_base 4: mod_base = OTHER; note = 2'-O-methyl modified nucleotide
  modified_base 5: mod_base = OTHER; note = 2'-fluoro modified nucleotide
  modified_base 6: mod_base = OTHER; note = 2'-O-methyl modified nucleotide
  modified_base 7: mod_base = OTHER; note = 2'-fluoro modified nucleotide
  modified_base 8: mod_base = OTHER; note = 2'-O-methyl modified nucleotide
  modified_base 9: mod_base = OTHER; note = 2'-fluoro modified nucleotide
  modified_base 10: mod_base = OTHER; note = 2'-O-methyl modified nucleotide
  modified_base 11: mod_base = OTHER; note = 2'-fluoro modified nucleotide
  modified_base 12: mod_base = OTHER; note = 2'-O-methyl modified nucleotide
  modified_base 13: mod_base = OTHER; note = 2'-fluoro modified nucleotide with phosphorothioate linkage
  modified_base 14: mod_base = OTHER; note = 2'-O-methyl modified nucleotide with phosphorothioate linkage
  misc_difference 15: note = 2'-fluoro modified nucleotide may be attached to trivalent N-Acetylgalactosamine
ccaggccaaactgta

SEQ ID NO: 864 - RNA, 15 nt, synthetic construct
  source 1..15: mol_type = other RNA
  modified_base 1: mod_base = OTHER; note = 2'-fluoro modified nucleotide with phosphorothioate linkage
  modified_base 2: mod_base = OTHER; note = 2'-O-methyl modified nucleotide with phosphorothioate linkage
  modified_base 3: mod_base = OTHER; note = 2'-fluoro modified nucleotide
  modified_base 4: mod_base = OTHER; note = 2'-O-methyl modified nucleotide
  modified_base 5: mod_base = OTHER; note = 2'-fluoro modified nucleotide
  modified_base 6: mod_base = OTHER; note = 2'-O-methyl modified nucleotide
  modified_base 7: mod_base = OTHER; note = 2'-fluoro modified nucleotide
  modified_base 8: mod_base = OTHER; note = 2'-O-methyl modified nucleotide
  modified_base 9: mod_base = OTHER; note = 2'-fluoro modified nucleotide
  modified_base 10: mod_base = OTHER; note = 2'-O-methyl modified nucleotide
  modified_base 11: mod_base = OTHER; note = 2'-fluoro modified nucleotide
  modified_base 12: mod_base = OTHER; note = 2'-O-methyl modified nucleotide
  modified_base 13: mod_base = OTHER; note = 2'-fluoro modified nucleotide with phosphorothioate linkage
  modified_base 14: mod_base = OTHER; note = 2'-O-methyl modified nucleotide with phosphorothioate linkage
  misc_difference 15: note = 2'-fluoro modified nucleotide may be attached to trivalent N-Acetylgalactosamine
taactcactataata

SEQ ID NO: 865 - RNA, 15 nt, synthetic construct
  source 1..15: mol_type = other RNA
  modified_base 1: mod_base = OTHER; note = 2'-fluoro modified nucleotide with phosphorothioate linkage
  modified_base 2: mod_base = OTHER; note = 2'-O-methyl modified nucleotide with phosphorothioate linkage
  modified_base 3: mod_base = OTHER; note = 2'-fluoro modified nucleotide
  modified_base 4: mod_base = OTHER; note = 2'-O-methyl modified nucleotide
  modified_base 5: mod_base = OTHER; note = 2'-fluoro modified nucleotide
  modified_base 6: mod_base = OTHER; note = 2'-O-methyl modified nucleotide
  modified_base 7: mod_base = OTHER; note = 2'-fluoro modified nucleotide
  modified_base 8: mod_base = OTHER; note = 2'-O-methyl modified nucleotide
  modified_base 9: mod_base = OTHER; note = 2'-fluoro modified nucleotide
  modified_base 10: mod_base = OTHER; note = 2'-O-methyl modified nucleotide
  modified_base 11: mod_base = OTHER; note = 2'-fluoro modified nucleotide
  modified_base 12: mod_base = OTHER; note = 2'-O-methyl modified nucleotide
  modified_base 13: mod_base = OTHER; note = 2'-fluoro modified nucleotide with phosphorothioate linkage
  modified_base 14: mod_base = OTHER; note = 2'-O-methyl modified nucleotide with phosphorothioate linkage
  misc_difference 15: note = 2'-fluoro modified nucleotide may be attached to trivalent N-Acetylgalactosamine
gacatctgacttgga

SEQ ID NO: 866 - RNA, 15 nt, synthetic construct
  source 1..15: mol_type = other RNA
  modified_base 1: mod_base = OTHER; note = 2'-fluoro modified nucleotide with phosphorothioate linkage
  modified_base 2: mod_base = OTHER; note = 2'-O-methyl modified nucleotide with phosphorothioate linkage
  modified_base 3: mod_base = OTHER; note = 2'-fluoro modified nucleotide
  modified_base 4: mod_base = OTHER; note = 2'-O-methyl modified nucleotide
  modified_base 5: mod_base = OTHER; note = 2'-fluoro modified nucleotide
  modified_base 6: mod_base = OTHER; note = 2'-O-methyl modified nucleotide
  modified_base 7: mod_base = OTHER; note = 2'-fluoro modified nucleotide
  modified_base 8: mod_base = OTHER; note = 2'-O-methyl modified nucleotide
  modified_base 9: mod_base = OTHER; note = 2'-fluoro modified nucleotide
  modified_base 10: mod_base = OTHER; note = 2'-O-methyl modified nucleotide
  modified_base 11: mod_base = OTHER; note = 2'-fluoro modified nucleotide
  modified_base 12: mod_base = OTHER; note = 2'-O-methyl modified nucleotide
  modified_base 13: mod_base = OTHER; note = 2'-fluoro modified nucleotide with phosphorothioate linkage
  modified_base 14: mod_base = OTHER; note = 2'-O-methyl modified nucleotide with phosphorothioate linkage
  misc_difference 15: note = 2'-fluoro modified nucleotide may be attached to trivalent N-Acetylgalactosamine
tatctcttttcctga

SEQ ID NO: 867 - RNA, 15 nt, synthetic construct
  source 1..15: mol_type = other RNA
  modified_base 1: mod_base = OTHER; note = 2'-fluoro modified nucleotide with phosphorothioate linkage
  modified_base 2: mod_base = OTHER; note = 2'-O-methyl modified nucleotide with phosphorothioate linkage
  modified_base 3: mod_base = OTHER; note = 2'-fluoro modified nucleotide
  modified_base 4: mod_base = OTHER; note = 2'-O-methyl modified nucleotide
  modified_base 5: mod_base = OTHER; note = 2'-fluoro modified nucleotide
  modified_base 6: mod_base = OTHER; note = 2'-O-methyl modified nucleotide
  modified_base 7: mod_base = OTHER; note = 2'-fluoro modified nucleotide
  modified_base 8: mod_base = OTHER; note = 2'-O-methyl modified nucleotide
  modified_base 9: mod_base = OTHER; note = 2'-fluoro modified nucleotide
  modified_base 10: mod_base = OTHER; note = 2'-O-methyl modified nucleotide
  modified_base 11: mod_base = OTHER; note = 2'-fluoro modified nucleotide
  modified_base 12: mod_base = OTHER; note = 2'-O-methyl modified nucleotide
  modified_base 13: mod_base = OTHER; note = 2'-fluoro modified nucleotide with phosphorothioate linkage
  modified_base 14: mod_base = OTHER; note = 2'-O-methyl modified nucleotide with phosphorothioate linkage
  misc_difference 15: note = 2'-fluoro modified nucleotide may be attached to trivalent N-Acetylgalactosamine
agaatatgtcttgca

SEQ ID NO: 868 - RNA, 15 nt, synthetic construct
  source 1..15: mol_type = other RNA
  modified_base 1: mod_base = OTHER; note = 2'-fluoro modified nucleotide with phosphorothioate linkage
  modified_base 2: mod_base = OTHER; note = 2'-O-methyl modified nucleotide with phosphorothioate linkage
  modified_base 3: mod_base = OTHER; note = 2'-fluoro modified nucleotide
  modified_base 4: mod_base = OTHER; note = 2'-O-methyl modified nucleotide
  modified_base 5: mod_base = OTHER; note = 2'-fluoro modified nucleotide
  modified_base 6: mod_base = OTHER; note = 2'-O-methyl modified nucleotide
  modified_base 7: mod_base = OTHER; note = 2'-fluoro modified nucleotide
  modified_base 8: mod_base = OTHER; note = 2'-O-methyl modified nucleotide
  modified_base 9: mod_base = OTHER; note = 2'-fluoro modified nucleotide
  modified_base 10: mod_base = OTHER; note = 2'-O-methyl modified nucleotide
  modified_base 11: mod_base = OTHER; note = 2'-fluoro modified nucleotide
  modified_base 12: mod_base = OTHER; note = 2'-O-methyl modified nucleotide
  modified_base 13: mod_base = OTHER; note = 2'-fluoro modified nucleotide with phosphorothioate linkage
  modified_base 14: mod_base = OTHER; note = 2'-O-methyl modified nucleotide with phosphorothioate linkage
  misc_difference 15: note = 2'-fluoro modified nucleotide may be attached to trivalent N-Acetylgalactosamine
tggaaattggcctta

SEQ ID NO: 869 - RNA, 15 nt, synthetic construct
  source 1..15: mol_type = other RNA
  modified_base 1: mod_base = OTHER; note = 2'-fluoro modified nucleotide with phosphorothioate linkage
  modified_base 2: mod_base = OTHER; note = 2'-O-methyl modified nucleotide with phosphorothioate linkage
  modified_base 3: mod_base = OTHER; note = 2'-fluoro modified nucleotide
  modified_base 4: mod_base = OTHER; note = 2'-O-methyl modified nucleotide
  modified_base 5: mod_base = OTHER; note = 2'-fluoro modified nucleotide
  modified_base 6: mod_base = OTHER; note = 2'-O-methyl modified nucleotide
  modified_base 7: mod_base = OTHER; note = 2'-fluoro modified nucleotide
  modified_base 8: mod_base = OTHER; note = 2'-O-methyl modified nucleotide
  modified_base 9: mod_base = OTHER; note = 2'-fluoro modified nucleotide
  modified_base 10: mod_base = OTHER; note = 2'-O-methyl modified nucleotide
  modified_base 11: mod_base = OTHER; note = 2'-fluoro modified nucleotide
  modified_base 12: mod_base = OTHER; note = 2'-O-methyl modified nucleotide
  modified_base 13: mod_base = OTHER; note = 2'-fluoro modified nucleotide with phosphorothioate linkage
  modified_base 14: mod_base = OTHER; note = 2'-O-methyl modified nucleotide with phosphorothioate linkage
  misc_difference 15: note = 2'-fluoro modified nucleotide may be attached to trivalent N-Acetylgalactosamine
cactataattactta

SEQ ID NO: 870 - RNA, 15 nt, synthetic construct
  source 1..15: mol_type = other RNA
  modified_base 1: mod_base = OTHER; note = 2'-fluoro modified nucleotide with phosphorothioate linkage
  modified_base 2: mod_base = OTHER; note = 2'-O-methyl modified nucleotide with phosphorothioate linkage
  modified_base 3: mod_base = OTHER; note = 2'-fluoro modified nucleotide
  modified_base 4: mod_base = OTHER; note = 2'-O-methyl modified nucleotide
  modified_base 5: mod_base = OTHER; note = 2'-fluoro modified nucleotide
  modified_base 6: mod_base = OTHER; note = 2'-O-methyl modified nucleotide
  modified_base 7: mod_base = OTHER; note = 2'-fluoro modified nucleotide
  modified_base 8: mod_base = OTHER; note = 2'-O-methyl modified nucleotide
  modified_base 9: mod_base = OTHER; note = 2'-fluoro modified nucleotide
  modified_base 10: mod_base = OTHER; note = 2'-O-methyl modified nucleotide
  modified_base 11: mod_base = OTHER; note = 2'-fluoro modified nucleotide
  modified_base 12: mod_base = OTHER; note = 2'-O-methyl modified nucleotide
  modified_base 13: mod_base = OTHER; note = 2'-fluoro modified nucleotide with phosphorothioate linkage
  modified_base 14: mod_base = OTHER; note = 2'-O-methyl modified nucleotide with phosphorothioate linkage
  misc_difference 15: note = 2'-fluoro modified nucleotide may be attached to trivalent N-Acetylgalactosamine
attacttgattttaa

SEQ ID NO: 871 - RNA, 15 nt, synthetic construct
  source 1..15: mol_type = other RNA
  modified_base 1: mod_base = OTHER; note = 2'-fluoro modified nucleotide with phosphorothioate linkage
  modified_base 2: mod_base = OTHER; note = 2'-O-methyl modified nucleotide with phosphorothioate linkage
  modified_base 3: mod_base = OTHER; note = 2'-fluoro modified nucleotide
  modified_base 4: mod_base = OTHER; note = 2'-O-methyl modified nucleotide
  modified_base 5: mod_base = OTHER; note = 2'-fluoro modified nucleotide
  modified_base 6: mod_base = OTHER; note = 2'-O-methyl modified nucleotide
  modified_base 7: mod_base = OTHER; note = 2'-fluoro modified nucleotide
  modified_base 8: mod_base = OTHER; note = 2'-O-methyl modified nucleotide
  modified_base 9: mod_base = OTHER; note = 2'-fluoro modified nucleotide
  modified_base 10: mod_base = OTHER; note = 2'-O-methyl modified nucleotide
  modified_base 11: mod_base = OTHER; note = 2'-fluoro modified nucleotide
  modified_base 12: mod_base = OTHER; note = 2'-O-methyl modified nucleotide
  modified_base 13: mod_base = OTHER; note = 2'-fluoro modified nucleotide with phosphorothioate linkage
  modified_base 14: mod_base = OTHER; note = 2'-O-methyl modified nucleotide with phosphorothioate linkage
  misc_difference 15: note = 2'-fluoro modified nucleotide may be attached to trivalent N-Acetylgalactosamine
ctataattacttgaa

SEQ ID NO: 872 - RNA, 15 nt, synthetic construct
  source 1..15: mol_type = other RNA
  modified_base 1: mod_base = OTHER; note = 2'-fluoro modified nucleotide with phosphorothioate linkage
  modified_base 2: mod_base = OTHER; note = 2'-O-methyl modified nucleotide with phosphorothioate linkage
  modified_base 3: mod_base = OTHER; note = 2'-fluoro modified nucleotide
  modified_base 4: mod_base = OTHER; note = 2'-O-methyl modified nucleotide
  modified_base 5: mod_base = OTHER; note = 2'-fluoro modified nucleotide
  modified_base 6: mod_base = OTHER; note = 2'-O-methyl modified nucleotide
  modified_base 7: mod_base = OTHER; note = 2'-fluoro modified nucleotide
  modified_base 8: mod_base = OTHER; note = 2'-O-methyl modified nucleotide
  modified_base 9: mod_base = OTHER; note = 2'-fluoro modified nucleotide
  modified_base 10: mod_base = OTHER; note = 2'-O-methyl modified nucleotide
  modified_base 11: mod_base = OTHER; note = 2'-fluoro modified nucleotide
  modified_base 12: mod_base = OTHER; note = 2'-O-methyl modified nucleotide
  modified_base 13: mod_base = OTHER; note = 2'-fluoro modified nucleotide with phosphorothioate linkage
  modified_base 14: mod_base = OTHER; note = 2'-O-methyl modified nucleotide with phosphorothioate linkage
  misc_difference 15: note = 2'-fluoro modified nucleotide may be attached to trivalent N-Acetylgalactosamine
cctctggaaattgga

SEQ ID NO: 873 - RNA, 15 nt, synthetic construct
  source 1..15: mol_type = other RNA
  modified_base 1: mod_base = OTHER; note = 2'-fluoro modified nucleotide with phosphorothioate linkage
  modified_base 2: mod_base = OTHER; note = 2'-O-methyl modified nucleotide with phosphorothioate linkage
  modified_base 3: mod_base = OTHER; note = 2'-fluoro modified nucleotide
  modified_base 4: mod_base = OTHER; note = 2'-O-methyl modified nucleotide
  modified_base 5: mod_base = OTHER; note = 2'-fluoro modified nucleotide
  modified_base 6: mod_base = OTHER; note = 2'-O-methyl modified nucleotide
  modified_base 7: mod_base = OTHER; note = 2'-fluoro modified nucleotide
  modified_base 8: mod_base = OTHER; note = 2'-O-methyl modified nucleotide
  modified_base 9: mod_base = OTHER; note = 2'-fluoro modified nucleotide
  modified_base 10: mod_base = OTHER; note = 2'-O-methyl modified nucleotide
  modified_base 11: mod_base = OTHER; note = 2'-fluoro modified nucleotide
  modified_base 12: mod_base = OTHER; note = 2'-O-methyl modified nucleotide
  modified_base 13: mod_base = OTHER; note = 2'-fluoro modified nucleotide with phosphorothioate linkage
  modified_base 14: mod_base = OTHER; note = 2'-O-methyl modified nucleotide with phosphorothioate linkage
  misc_difference 15: note = 2'-fluoro modified nucleotide may be attached to trivalent N-Acetylgalactosamine
ctcactataattaca

SEQ ID NO: 874 - RNA, 15 nt, synthetic construct
  source 1..15: mol_type = other RNA
  modified_base 1: mod_base = OTHER; note = 2'-fluoro modified nucleotide with phosphorothioate linkage
  modified_base 2: mod_base = OTHER; note = 2'-O-methyl modified nucleotide with phosphorothioate linkage
  modified_base 3: mod_base = OTHER; note = 2'-fluoro modified nucleotide
  modified_base 4: mod_base = OTHER; note = 2'-O-methyl modified nucleotide
  modified_base 5: mod_base = OTHER; note = 2'-fluoro modified nucleotide
  modified_base 6: mod_base = OTHER; note = 2'-O-methyl modified nucleotide
  modified_base 7: mod_base = OTHER; note = 2'-fluoro modified nucleotide
  modified_base 8: mod_base = OTHER; note = 2'-O-methyl modified nucleotide
  modified_base 9: mod_base = OTHER; note = 2'-fluoro modified nucleotide
  modified_base 10: mod_base = OTHER; note = 2'-O-methyl modified nucleotide
  modified_base 11: mod_base = OTHER; note = 2'-fluoro modified nucleotide
  modified_base 12: mod_base = OTHER; note = 2'-O-methyl modified nucleotide
  modified_base 13: mod_base = OTHER; note = 2'-fluoro modified nucleotide with phosphorothioate linkage
  modified_base 14: mod_base = OTHER; note = 2'-O-methyl modified nucleotide with phosphorothioate linkage
  misc_difference 15: note = 2'-fluoro modified nucleotide may be attached to trivalent N-Acetylgalactosamine
caacaagtaccttta

SEQ ID NO: 875 - RNA, 15 nt, synthetic construct
  source 1..15: mol_type = other RNA
  modified_base 1: mod_base = OTHER; note = 2'-fluoro modified nucleotide with phosphorothioate linkage
  modified_base 2: mod_base = OTHER; note = 2'-O-methyl modified nucleotide with phosphorothioate linkage
  modified_base 3: mod_base = OTHER; note = 2'-fluoro modified nucleotide
  modified_base 4: mod_base = OTHER; note = 2'-O-methyl modified nucleotide
  modified_base 5: mod_base = OTHER; note = 2'-fluoro modified nucleotide
  modified_base 6: mod_base = OTHER; note = 2'-O-methyl modified nucleotide
  modified_base 7: mod_base = OTHER; note = 2'-fluoro modified nucleotide
  modified_base 8: mod_base = OTHER; note = 2'-O-methyl modified nucleotide
  modified_base 9: mod_base = OTHER; note = 2'-fluoro modified nucleotide
  modified_base 10: mod_base = OTHER; note = 2'-O-methyl modified nucleotide
  modified_base 11: mod_base = OTHER; note = 2'-fluoro modified nucleotide
  modified_base 12: mod_base = OTHER; note = 2'-O-methyl modified nucleotide
  modified_base 13: mod_base = OTHER; note = 2'-fluoro modified nucleotide with phosphorothioate linkage
  modified_base 14: mod_base = OTHER; note = 2'-O-methyl modified nucleotide with phosphorothioate linkage
  misc_difference 15: note = 2'-fluoro modified nucleotide may be attached to trivalent N-Acetylgalactosamine
tctgaaacagcagta

SEQ ID NO: 876 - RNA, 15 nt, synthetic construct
  source 1..15: mol_type = other RNA
  modified_base 1: mod_base = OTHER; note = 2'-fluoro modified nucleotide with phosphorothioate linkage
  modified_base 2: mod_base = OTHER; note = 2'-O-methyl modified nucleotide with phosphorothioate linkage
  modified_base 3: mod_base = OTHER; note = 2'-fluoro modified nucleotide
  modified_base 4: mod_base = OTHER; note = 2'-O-methyl modified nucleotide
  modified_base 5: mod_base = OTHER; note = 2'-fluoro modified nucleotide
  modified_base 6: mod_base = OTHER; note = 2'-O-methyl modified nucleotide
  modified_base 7: mod_base = OTHER; note = 2'-fluoro modified nucleotide
  modified_base 8: mod_base = OTHER; note = 2'-O-methyl modified nucleotide
  modified_base 9: mod_base = OTHER; note = 2'-fluoro modified nucleotide
  modified_base 10: mod_base = OTHER; note = 2'-O-methyl modified nucleotide
  modified_base 11: mod_base = OTHER; note = 2'-fluoro modified nucleotide
  modified_base 12: mod_base = OTHER; note = 2'-O-methyl modified nucleotide
  modified_base 13: mod_base = OTHER; note = 2'-fluoro modified nucleotide with phosphorothioate linkage
  modified_base 14: mod_base = OTHER; note = 2'-O-methyl modified nucleotide with phosphorothioate linkage
  misc_difference 15: note = 2'-fluoro modified nucleotide may be attached to trivalent N-Acetylgalactosamine
ttctgaaacagcaga

SEQ ID NO: 877 - RNA, 15 nt, synthetic construct
  source 1..15: mol_type = other RNA
  modified_base 1: mod_base = OTHER; note = 2'-fluoro modified nucleotide with phosphorothioate linkage
  modified_base 2: mod_base = OTHER; note = 2'-O-methyl modified nucleotide with phosphorothioate linkage
  modified_base 3: mod_base = OTHER; note = 2'-fluoro modified nucleotide
  modified_base 4: mod_base = OTHER; note = 2'-O-methyl modified nucleotide
  modified_base 5: mod_base = OTHER; note = 2'-fluoro modified nucleotide
  modified_base 6: mod_base = OTHER; note = 2'-O-methyl modified nucleotide
  modified_base 7: mod_base = OTHER; note = 2'-fluoro modified nucleotide
  modified_base 8: mod_base = OTHER; note = 2'-O-methyl modified nucleotide
  modified_base 9: mod_base = OTHER; note = 2'-fluoro modified nucleotide
  modified_base 10: mod_base = OTHER; note = 2'-O-methyl modified nucleotide
  modified_base 11: mod_base = OTHER; note = 2'-fluoro modified nucleotide
  modified_base 12: mod_base = OTHER; note = 2'-O-methyl modified nucleotide
  modified_base 13: mod_base = OTHER; note = 2'-fluoro modified nucleotide with phosphorothioate linkage
  modified_base 14: mod_base = OTHER; note = 2'-O-methyl modified nucleotide with phosphorothioate linkage
  misc_difference 15: note = 2'-fluoro modified nucleotide may be attached to trivalent N-Acetylgalactosamine
caagtacctttataa

SEQ ID NO: 878 - RNA, 15 nt, synthetic construct
  source 1..15: mol_type = other RNA
  modified_base 1: mod_base = OTHER; note = 2'-fluoro modified nucleotide with phosphorothioate linkage
  modified_base 2: mod_base = OTHER; note = 2'-O-methyl modified nucleotide with phosphorothioate linkage
  modified_base 3: mod_base = OTHER; note = 2'-fluoro modified nucleotide
  modified_base 4: mod_base = OTHER; note = 2'-O-methyl modified nucleotide
  modified_base 5: mod_base = OTHER; note = 2'-fluoro modified nucleotide
  modified_base 6: mod_base = OTHER; note = 2'-O-methyl modified nucleotide
  modified_base 7: mod_base = OTHER; note = 2'-fluoro modified nucleotide
  modified_base 8: mod_base = OTHER; note = 2'-O-methyl modified nucleotide
  modified_base 9: mod_base = OTHER; note = 2'-fluoro modified nucleotide
  modified_base 10: mod_base = OTHER; note = 2'-O-methyl modified nucleotide
  modified_base 11: mod_base = OTHER; note = 2'-fluoro modified nucleotide
  modified_base 12: mod_base = OTHER; note = 2'-O-methyl modified nucleotide
  modified_base 13: mod_base = OTHER; note = 2'-fluoro modified nucleotide with phosphorothioate linkage
  modified_base 14: mod_base = OTHER; note = 2'-O-methyl modified nucleotide with phosphorothioate linkage
  misc_difference 15: note = 2'-fluoro modified nucleotide may be attached to trivalent N-Acetylgalactosamine
aaggaactgtttaca

SEQ ID NO: 879 - RNA, 15 nt, synthetic construct
  source 1..15: mol_type = other RNA
  modified_base 1: mod_base = OTHER; note = 2'-fluoro modified nucleotide with phosphorothioate linkage
  modified_base 2: mod_base = OTHER; note = 2'-O-methyl modified nucleotide with phosphorothioate linkage
  modified_base 3: mod_base = OTHER; note = 2'-fluoro modified nucleotide
  modified_base 4: mod_base = OTHER; note = 2'-O-methyl modified nucleotide
  modified_base 5: mod_base = OTHER; note = 2'-fluoro modified nucleotide
  modified_base 6: mod_base = OTHER; note = 2'-O-methyl modified nucleotide
  modified_base 7: mod_base = OTHER; note = 2'-fluoro modified nucleotide
  modified_base 8: mod_base = OTHER; note = 2'-O-methyl modified nucleotide
  modified_base 9: mod_base = OTHER; note = 2'-fluoro modified nucleotide
  modified_base 10: mod_base = OTHER; note = 2'-O-methyl modified nucleotide
  modified_base 11: mod_base = OTHER; note = 2'-fluoro modified nucleotide
  modified_base 12: mod_base = OTHER; note = 2'-O-methyl modified nucleotide
  modified_base 13: mod_base = OTHER; note = 2'-fluoro modified nucleotide with phosphorothioate linkage
  modified_base 14: mod_base = OTHER; note = 2'-O-methyl modified nucleotide with phosphorothioate linkage
  misc_difference 15: note = 2'-fluoro modified nucleotide may be attached to trivalent N-Acetylgalactosamine
tcagccaaagttaca

SEQ ID NO: 880 - RNA, 15 nt, synthetic construct
  source 1..15: mol_type = other RNA
  modified_base 1: mod_base = OTHER; note = 2'-fluoro modified nucleotide with phosphorothioate linkage
  modified_base 2: mod_base = OTHER; note = 2'-O-methyl modified nucleotide with phosphorothioate linkage
  modified_base 3: mod_base = OTHER; note = 2'-fluoro modified nucleotide
  modified_base 4: mod_base = OTHER; note = 2'-O-methyl modified nucleotide
  modified_base 5: mod_base = OTHER; note = 2'-fluoro modified nucleotide
  modified_base 6: mod_base = OTHER; note = 2'-O-methyl modified nucleotide
  modified_base 7: mod_base = OTHER; note = 2'-fluoro modified nucleotide
  modified_base 8: mod_base = OTHER; note = 2'-O-methyl modified nucleotide
  modified_base 9: mod_base = OTHER; note = 2'-fluoro modified nucleotide
  modified_base 10: mod_base = OTHER; note = 2'-O-methyl modified nucleotide
  modified_base 11: mod_base = OTHER; note = 2'-fluoro modified nucleotide
  modified_base 12: mod_base = OTHER; note = 2'-O-methyl modified nucleotide
  modified_base 13: mod_base = OTHER; note = 2'-fluoro modified nucleotide with phosphorothioate linkage
  modified_base 14: mod_base = OTHER; note = 2'-O-methyl modified nucleotide with phosphorothioate linkage
  misc_difference 15: note = 2'-fluoro modified nucleotide may be attached to trivalent N-Acetylgalactosamine
ctgtttacaactata

SEQ ID NO: 881 - RNA, 15 nt, synthetic construct
  source 1..15: mol_type = other RNA
  modified_base 1: mod_base = OTHER; note = 2'-fluoro modified nucleotide with phosphorothioate linkage
  modified_base 2: mod_base = OTHER; note = 2'-O-methyl modified nucleotide with phosphorothioate linkage
  modified_base 3: mod_base = OTHER; note = 2'-fluoro modified nucleotide
  modified_base 4: mod_base = OTHER; note = 2'-O-methyl modified nucleotide
  modified_base 5: mod_base = OTHER; note = 2'-fluoro modified nucleotide
  modified_base 6: mod_base = OTHER; note = 2'-O-methyl modified nucleotide
  modified_base 7: mod_base = OTHER; note = 2'-fluoro modified nucleotide
  modified_base 8: mod_base = OTHER; note = 2'-O-methyl modified nucleotide
  modified_base 9: mod_base = OTHER; note = 2'-fluoro modified nucleotide
  modified_base 10: mod_base = OTHER; note = 2'-O-methyl modified nucleotide
  modified_base 11: mod_base = OTHER; note = 2'-fluoro modified nucleotide
  modified_base 12: mod_base = OTHER; note = 2'-O-methyl modified nucleotide
  modified_base 13: mod_base = OTHER; note = 2'-fluoro modified nucleotide with phosphorothioate linkage
  modified_base 14: mod_base = OTHER; note = 2'-O-methyl modified nucleotide with phosphorothioate linkage
  misc_difference 15: note = 2'-fluoro modified nucleotide may be attached to trivalent N-Acetylgalactosamine
agttaaagaatatga

SEQ ID NO: 882 - RNA, 15 nt, synthetic construct
  source 1..15: mol_type = other RNA
  modified_base 1: mod_base = OTHER; note = 2'-fluoro modified nucleotide with phosphorothioate linkage
  modified_base 2: mod_base = OTHER; note = 2'-O-methyl modified nucleotide with phosphorothioate linkage
  modified_base 3: mod_base = OTHER; note = 2'-fluoro modified nucleotide
  modified_base 4: mod_base = OTHER; note = 2'-O-methyl modified nucleotide
  modified_base 5: mod_base = OTHER; note = 2'-fluoro modified nucleotide
  modified_base 6: mod_base = OTHER; note = 2'-O-methyl modified nucleotide
  modified_base 7: mod_base = OTHER; note = 2'-fluoro modified nucleotide
  modified_base 8: mod_base = OTHER; note = 2'-O-methyl modified nucleotide
  modified_base 9: mod_base = OTHER; note = 2'-fluoro modified nucleotide
  modified_base 10: mod_base = OTHER; note = 2'-O-methyl modified nucleotide
  modified_base 11: mod_base = OTHER; note = 2'-fluoro modified nucleotide
  modified_base 12: mod_base = OTHER; note = 2'-O-methyl modified nucleotide
  modified_base 13: mod_base = OTHER; note = 2'-fluoro modified nucleotide with phosphorothioate linkage
  modified_base 14: mod_base = OTHER; note = 2'-O-methyl modified nucleotide with phosphorothioate linkage
  misc_difference 15: note = 2'-fluoro modified nucleotide may be attached to trivalent N-Acetylgalactosamine
gtaaaaggactgcta

SEQ ID NO: 883 - RNA, 15 nt, synthetic construct
  source 1..15: mol_type = other RNA
  modified_base 1: mod_base = OTHER; note = 2'-fluoro modified nucleotide with phosphorothioate linkage
  modified_base 2: mod_base = OTHER; note = 2'-O-methyl modified nucleotide with phosphorothioate linkage
  modified_base 3: mod_base = OTHER; note = 2'-fluoro modified nucleotide
  modified_base 4: mod_base = OTHER; note = 2'-O-methyl modified nucleotide
  modified_base 5: mod_base = OTHER; note = 2'-fluoro modified nucleotide
  modified_base 6: mod_base = OTHER; note = 2'-O-methyl modified nucleotide
  modified_base 7: mod_base = OTHER; note = 2'-fluoro modified nucleotide
  modified_base 8: mod_base = OTHER; note = 2'-O-methyl modified nucleotide
  modified_base 9: mod_base = OTHER; note = 2'-fluoro modified nucleotide
  modified_base 10: mod_base = OTHER; note = 2'-O-methyl modified nucleotide
  modified_base 11: mod_base = OTHER; note = 2'-fluoro modified nucleotide
  modified_base 12: mod_base = OTHER; note = 2'-O-methyl modified nucleotide
  modified_base 13: mod_base = OTHER; note = 2'-fluoro modified nucleotide with phosphorothioate linkage
  modified_base 14: mod_base = OTHER; note = 2'-O-methyl modified nucleotide with phosphorothioate linkage
  misc_difference 15: note = 2'-fluoro modified nucleotide may be attached to trivalent N-Acetylgalactosamine
caaaataactcacta

SEQ ID NO: 884 - RNA, 15 nt, synthetic construct
  source 1..15: mol_type = other RNA
  modified_base 1: mod_base = OTHER; note = 2'-fluoro modified nucleotide with phosphorothioate linkage
  modified_base 2: mod_base = OTHER; note = 2'-O-methyl modified nucleotide with phosphorothioate linkage
  modified_base 3: mod_base = OTHER; note = 2'-fluoro modified nucleotide
  modified_base 4: mod_base = OTHER; note = 2'-O-methyl modified nucleotide
  modified_base 5: mod_base = OTHER; note = 2'-fluoro modified nucleotide
  modified_base 6: mod_base = OTHER; note = 2'-O-methyl modified nucleotide
  modified_base 7: mod_base = OTHER; note = 2'-fluoro modified nucleotide
  modified_base 8: mod_base = OTHER; note = 2'-O-methyl modified nucleotide
  modified_base 9: mod_base = OTHER; note = 2'-fluoro modified nucleotide
  modified_base 10: mod_base = OTHER; note = 2'-O-methyl modified nucleotide
  modified_base 11: mod_base = OTHER; note = 2'-fluoro modified nucleotide
  modified_base 12: mod_base = OTHER; note = 2'-O-methyl modified nucleotide
  modified_base 13: mod_base = OTHER; note = 2'-fluoro modified nucleotide with phosphorothioate linkage
  modified_base 14: mod_base = OTHER; note = 2'-O-methyl modified nucleotide with phosphorothioate linkage
  misc_difference 15: note = 2'-fluoro modified nucleotide may be attached to trivalent N-Acetylgalactosamine
caaagatgtcttcca

SEQ ID NO: 885 - RNA, 15 nt, synthetic construct
  source 1..15: mol_type = other RNA
  modified_base 1: mod_base = OTHER; note = 2'-fluoro modified nucleotide with phosphorothioate linkage
  modified_base 2: mod_base = OTHER; note = 2'-O-methyl modified nucleotide with phosphorothioate linkage
  modified_base 3: mod_base = OTHER; note = 2'-fluoro modified nucleotide
  modified_base 4: mod_base = OTHER; note = 2'-O-methyl modified nucleotide
  modified_base 5: mod_base = OTHER; note = 2'-fluoro modified nucleotide
  modified_base 6: mod_base = OTHER; note = 2'-O-methyl modified nucleotide
  modified_base 7: mod_base = OTHER; note = 2'-fluoro modified nucleotide
  modified_base 8: mod_base = OTHER; note = 2'-O-methyl modified nucleotide
  modified_base 9: mod_base = OTHER; note = 2'-fluoro modified nucleotide
  modified_base 10: mod_base = OTHER; note = 2'-O-methyl modified nucleotide
  modified_base 11: mod_base = OTHER; note = 2'-fluoro modified nucleotide
  modified_base 12: mod_base = OTHER; note = 2'-O-methyl modified nucleotide
  modified_base 13: mod_base = OTHER; note = 2'-fluoro modified nucleotide with phosphorothioate linkage
  modified_base 14: mod_base = OTHER; note = 2'-O-methyl modified nucleotide with phosphorothioate linkage
  misc_difference 15: note = 2'-fluoro modified nucleotide may be attached to trivalent N-Acetylgalactosamine
gtgtaaaaggactga

SEQ ID NO: 886 - RNA, 15 nt, synthetic construct
  source 1..15: mol_type = other RNA
  modified_base 1: mod_base = OTHER; note = 2'-fluoro modified nucleotide with phosphorothioate linkage
  modified_base 2: mod_base = OTHER; note = 2'-O-methyl modified nucleotide with phosphorothioate linkage
  modified_base 3: mod_base = OTHER; note = 2'-fluoro modified nucleotide
  modified_base 4: mod_base = OTHER; note = 2'-O-methyl modified nucleotide
  modified_base 5: mod_base = OTHER; note = 2'-fluoro modified nucleotide
  modified_base 6: mod_base = OTHER; note = 2'-O-methyl modified nucleotide
  modified_base 7: mod_base = OTHER; note = 2'-fluoro modified nucleotide
  modified_base 8: mod_base = OTHER; note = 2'-O-methyl modified nucleotide
  modified_base 9: mod_base = OTHER; note = 2'-fluoro modified nucleotide
  modified_base 10: mod_base = OTHER; note = 2'-O-methyl modified nucleotide
  modified_base 11: mod_base = OTHER; note = 2'-fluoro modified nucleotide
  modified_base 12: mod_base = OTHER; note = 2'-O-methyl modified nucleotide
  modified_base 13: mod_base = OTHER; note = 2'-fluoro modified nucleotide with phosphorothioate linkage
  modified_base 14: mod_base = OTHER; note = 2'-O-methyl modified nucleotide with phosphorothioate linkage
  misc_difference 15: note = 2'-fluoro modified nucleotide may be attached to trivalent N-Acetylgalactosamine
attgacaaaataaca

SEQ ID NO: 887 - RNA, 15 nt, synthetic construct
  source 1..15: mol_type = other RNA
  modified_base 1: mod_base = OTHER; note = 2'-fluoro modified nucleotide with phosphorothioate linkage
  modified_base 2: mod_base = OTHER; note = 2'-O-methyl modified nucleotide with phosphorothioate linkage
  modified_base 3: mod_base = OTHER; note = 2'-fluoro modified nucleotide
  modified_base 4: mod_base = OTHER; note = 2'-O-methyl modified nucleotide
  modified_base 5: mod_base = OTHER; note = 2'-fluoro modified nucleotide
  modified_base 6: mod_base = OTHER; note = 2'-O-methyl modified nucleotide
  modified_base 7: mod_base = OTHER; note = 2'-fluoro modified nucleotide
  modified_base 8: mod_base = OTHER; note = 2'-O-methyl modified nucleotide
  modified_base 9: mod_base = OTHER; note = 2'-fluoro modified nucleotide
  modified_base 10: mod_base = OTHER; note = 2'-O-methyl modified nucleotide
  modified_base 11: mod_base = OTHER; note = 2'-fluoro modified nucleotide
  modified_base 12: mod_base = OTHER; note = 2'-O-methyl modified nucleotide
  modified_base 13: mod_base = OTHER; note = 2'-fluoro modified nucleotide with phosphorothioate linkage
  modified_base 14: mod_base = OTHER; note = 2'-O-methyl modified nucleotide with phosphorothioate linkage
  misc_difference 15: note = 2'-fluoro modified nucleotide may be attached to trivalent N-Acetylgalactosamine
catattctgttgtaa

SEQ ID NO: 888 - RNA, 15 nt, synthetic construct
  source 1..15: mol_type = other RNA
  modified_base 1: mod_base = OTHER; note = 2'-fluoro modified nucleotide with phosphorothioate linkage
  modified_base 2: mod_base = OTHER; note = 2'-O-methyl modified nucleotide with phosphorothioate linkage
  modified_base 3: mod_base = OTHER; note = 2'-fluoro modified nucleotide
  modified_base 4: mod_base = OTHER; note = 2'-O-methyl modified nucleotide
  modified_base 5: mod_base = OTHER; note = 2'-fluoro modified nucleotide
  modified_base 6: mod_base = OTHER; note = 2'-O-methyl modified nucleotide
  modified_base 7: mod_base = OTHER; note = 2'-fluoro modified nucleotide
  modified_base 8: mod_base = OTHER; note = 2'-O-methyl modified nucleotide
  modified_base 9: mod_base = OTHER; note = 2'-fluoro modified nucleotide
  modified_base 10: mod_base = OTHER; note = 2'-O-methyl modified nucleotide
  modified_base 11: mod_base = OTHER; note = 2'-fluoro modified nucleotide
  modified_base 12: mod_base = OTHER; note = 2'-O-methyl modified nucleotide
  modified_base 13: mod_base = OTHER; note = 2'-fluoro modified nucleotide with phosphorothioate linkage
  modified_base 14: mod_base = OTHER; note = 2'-O-methyl modified nucleotide with phosphorothioate linkage
  misc_difference 15: note = 2'-fluoro modified nucleotide may be attached to trivalent N-Acetylgalactosamine
tattgacaaaataaa

SEQ ID NO: 889 - RNA, 15 nt, synthetic construct
  source 1..15: mol_type = other RNA
  modified_base 1: mod_base = OTHER; note = 2'-fluoro modified nucleotide with phosphorothioate linkage
  modified_base 2: mod_base = OTHER; note = 2'-O-methyl modified nucleotide with phosphorothioate linkage
  modified_base 3: mod_base = OTHER; note = 2'-fluoro modified nucleotide
  modified_base 4: mod_base = OTHER; note = 2'-O-methyl modified nucleotide
  modified_base 5: mod_base = OTHER; note = 2'-fluoro modified nucleotide
  modified_base 6: mod_base = OTHER; note = 2'-O-methyl modified nucleotide
  modified_base 7: mod_base = OTHER; note = 2'-fluoro modified nucleotide
  modified_base 8: mod_base = OTHER; note = 2'-O-methyl modified nucleotide
  modified_base 9: mod_base = OTHER; note = 2'-fluoro modified nucleotide
  modified_base 10: mod_base = OTHER; note = 2'-O-methyl modified nucleotide
  modified_base 11: mod_base = OTHER; note = 2'-fluoro modified nucleotide
  modified_base 12: mod_base = OTHER; note = 2'-O-methyl modified nucleotide
  modified_base 13: mod_base = OTHER; note = 2'-fluoro modified nucleotide with phosphorothioate linkage
  modified_base 14: mod_base = OTHER; note = 2'-O-methyl modified nucleotide with phosphorothioate linkage
  misc_difference 15: note = 2'-fluoro modified nucleotide may be attached to trivalent N-Acetylgalactosamine
ttttcctgaagccta

SEQ ID NO: 890 - RNA, 15 nt, synthetic construct
  source 1..15: mol_type = other RNA
  modified_base 1: mod_base = OTHER; note = 2'-fluoro modified nucleotide with phosphorothioate linkage
  modified_base 2: mod_base = OTHER; note = 2'-O-methyl modified nucleotide with phosphorothioate linkage
  modified_base 3: mod_base = OTHER; note = 2'-fluoro modified nucleotide
  modified_base 4: mod_base = OTHER; note = 2'-O-methyl modified nucleotide
  modified_base 5: mod_base = OTHER; note = 2'-fluoro modified nucleotide
  modified_base 6: mod_base = OTHER; note = 2'-O-methyl modified nucleotide
  modified_base 7: mod_base = OTHER; note = 2'-fluoro modified nucleotide
  modified_base 8: mod_base = OTHER; note = 2'-O-methyl modified nucleotide
  modified_base 9: mod_base = OTHER; note = 2'-fluoro modified nucleotide
  modified_base 10: mod_base = OTHER; note = 2'-O-methyl modified nucleotide
  modified_base 11: mod_base = OTHER; note = 2'-fluoro modified nucleotide
  modified_base 12: mod_base = OTHER; note = 2'-O-methyl modified nucleotide
  modified_base 13: mod_base = OTHER; note = 2'-fluoro modified nucleotide with phosphorothioate linkage
  modified_base 14: mod_base = OTHER; note = 2'-O-methyl modified nucleotide with phosphorothioate linkage
  misc_difference 15: note = 2'-fluoro modified nucleotide may be attached to trivalent N-Acetylgalactosamine
attatctcttttcca

SEQ ID NO: 891 - RNA, 15 nt, synthetic construct
  source 1..15: mol_type = other RNA
  modified_base 1: mod_base = OTHER; note = 2'-fluoro modified nucleotide with phosphorothioate linkage
  modified_base 2: mod_base = OTHER; note = 2'-O-methyl modified nucleotide with phosphorothioate linkage
  modified_base 3: mod_base = OTHER; note = 2'-fluoro modified nucleotide
  modified_base 4: mod_base = OTHER; note = 2'-O-methyl modified nucleotide
  modified_base 5: mod_base = OTHER; note = 2'-fluoro modified nucleotide
  modified_base 6: mod_base = OTHER; note = 2'-O-methyl modified nucleotide
  modified_base 7: mod_base = OTHER; note = 2'-fluoro modified nucleotide
  modified_base 8: mod_base = OTHER; note = 2'-O-methyl modified nucleotide
  modified_base 9: mod_base = OTHER; note = 2'-fluoro modified nucleotide
  modified_base 10: mod_base = OTHER; note = 2'-O-methyl modified nucleotide
  modified_base 11: mod_base = OTHER; note = 2'-fluoro modified nucleotide
  modified_base 12: mod_base = OTHER; note = 2'-O-methyl modified nucleotide
  modified_base 13: mod_base = OTHER; note = 2'-fluoro modified nucleotide with phosphorothioate linkage
  modified_base 14: mod_base = OTHER; note = 2'-O-methyl modified nucleotide with phosphorothioate linkage
  misc_difference 15: note = 2'-fluoro modified nucleotide may be attached to trivalent N-Acetylgalactosamine
tatattgctgtaaca

SEQ ID NO: 892 - RNA, 15 nt, synthetic construct
  source 1..15: mol_type = other RNA
  modified_base 1: mod_base = OTHER; note = 2'-fluoro modified nucleotide with phosphorothioate linkage
  modified_base 2: mod_base = OTHER; note = 2'-O-methyl modified nucleotide with phosphorothioate linkage
  modified_base 3: mod_base = OTHER; note = 2'-fluoro modified nucleotide
  modified_base 4: mod_base = OTHER; note = 2'-O-methyl modified nucleotide
  modified_base 5: mod_base = OTHER; note = 2'-fluoro modified nucleotide
  modified_base 6: mod_base = OTHER; note = 2'-O-methyl modified nucleotide
  modified_base 7: mod_base = OTHER; note = 2'-fluoro modified nucleotide
  modified_base 8: mod_base = OTHER; note = 2'-O-methyl modified nucleotide
  modified_base 9: mod_base = OTHER; note = 2'-fluoro modified nucleotide
  modified_base 10: mod_base = OTHER; note = 2'-O-methyl modified nucleotide
  modified_base 11: mod_base = OTHER; note = 2'-fluoro modified nucleotide
  modified_base 12: mod_base = OTHER; note = 2'-O-methyl modified nucleotide
  modified_base 13: mod_base = OTHER; note = 2'-fluoro modified nucleotide with phosphorothioate linkage
  modified_base 14: mod_base = OTHER; note = 2'-O-methyl modified nucleotide with phosphorothioate linkage
  misc_difference 15: note = 2'-fluoro modified nucleotide may be attached to trivalent N-Acetylgalactosamine
ttgcatatgcttata

SEQ ID NO: 893 - RNA, 15 nt, synthetic construct
  source 1..15: mol_type = other RNA
  modified_base 1: mod_base = OTHER; note = 2'-fluoro modified nucleotide with phosphorothioate linkage
  modified_base 2: mod_base = OTHER; note = 2'-O-methyl modified nucleotide with phosphorothioate linkage
  modified_base 3: mod_base = OTHER; note = 2'-fluoro modified nucleotide
  modified_base 4: mod_base = OTHER; note = 2'-O-methyl modified nucleotide
  modified_base 5: mod_base = OTHER; note = 2'-fluoro modified nucleotide
  modified_base 6: mod_base = OTHER; note = 2'-O-methyl modified nucleotide
  modified_base 7: mod_base = OTHER; note = 2'-fluoro modified nucleotide
  modified_base 8: mod_base = OTHER; note = 2'-O-methyl modified nucleotide
  modified_base 9: mod_base = OTHER; note = 2'-fluoro modified nucleotide
  modified_base 10: mod_base = OTHER; note = 2'-O-methyl modified nucleotide
  modified_base 11: mod_base = OTHER; note = 2'-fluoro modified nucleotide
  modified_base 12: mod_base = OTHER; note = 2'-O-methyl modified nucleotide
  modified_base 13: mod_base = OTHER; note = 2'-fluoro modified nucleotide with phosphorothioate linkage
  modified_base 14: mod_base = OTHER; note = 2'-O-methyl modified nucleotide with phosphorothioate linkage
  misc_difference 15: note = 2'-fluoro modified nucleotide may be attached to trivalent N-Acetylgalactosamine
aagttaaagaatata

SEQ ID NO: 894 - RNA, 15 nt, synthetic construct
  source 1..15: mol_type = other RNA
  modified_base 1: mod_base = OTHER; note = 2'-fluoro modified nucleotide with phosphorothioate linkage
  modified_base 2: mod_base = OTHER; note = 2'-O-methyl modified nucleotide with phosphorothioate linkage
  modified_base 3: mod_base = OTHER; note = 2'-fluoro modified nucleotide
  modified_base 4: mod_base = OTHER; note = 2'-O-methyl modified nucleotide
  modified_base 5: mod_base = OTHER; note = 2'-fluoro modified nucleotide
  modified_base 6: mod_base = OTHER; note = 2'-O-methyl modified nucleotide
  modified_base 7: mod_base = OTHER; note = 2'-fluoro modified nucleotide
  modified_base 8: mod_base = OTHER; note = 2'-O-methyl modified nucleotide
  modified_base 9: mod_base = OTHER; note = 2'-fluoro modified nucleotide
  modified_base 10: mod_base = OTHER; note = 2'-O-methyl modified nucleotide
  modified_base 11: mod_base = OTHER; note = 2'-fluoro modified nucleotide
  modified_base 12: mod_base = OTHER; note = 2'-O-methyl modified nucleotide
  modified_base 13: mod_base = OTHER; note = 2'-fluoro modified nucleotide with phosphorothioate linkage
  modified_base 14: mod_base = OTHER; note = 2'-O-methyl modified nucleotide with phosphorothioate linkage
  misc_difference 15: note = 2'-fluoro modified nucleotide may be attached to trivalent N-Acetylgalactosamine
gttcaaagatgtcta

SEQ ID NO: 895 - RNA, 15 nt, synthetic construct
  source 1..15: mol_type = other RNA
  modified_base 1: mod_base = OTHER; note = 2'-fluoro modified nucleotide with phosphorothioate linkage
  modified_base 2: mod_base = OTHER; note = 2'-O-methyl modified nucleotide with phosphorothioate linkage
  modified_base 3: mod_base = OTHER; note = 2'-fluoro modified nucleotide
  modified_base 4: mod_base = OTHER; note = 2'-O-methyl modified nucleotide
  modified_base 5: mod_base = OTHER; note = 2'-fluoro modified nucleotide
  modified_base 6: mod_base = OTHER; note = 2'-O-methyl modified nucleotide
  modified_base 7: mod_base = OTHER; note = 2'-fluoro modified nucleotide
  modified_base 8: mod_base = OTHER; note = 2'-O-methyl modified nucleotide
  modified_base 9: mod_base = OTHER; note = 2'-fluoro modified nucleotide
  modified_base 10: mod_base = OTHER; note = 2'-O-methyl modified nucleotide
  modified_base 11: mod_base = OTHER; note = 2'-fluoro modified nucleotide
  modified_base 12: mod_base = OTHER; note = 2'-O-methyl modified nucleotide
  modified_base 13: mod_base = OTHER; note = 2'-fluoro modified nucleotide with phosphorothioate linkage
  modified_base 14: mod_base = OTHER; note = 2'-O-methyl modified nucleotide with phosphorothioate linkage
  misc_difference 15: note = 2'-fluoro modified nucleotide may be attached to trivalent N-Acetylgalactosamine
aagatgtcttcctga

SEQ ID NO: 896 - RNA, 15 nt, synthetic construct
  source 1..15: mol_type = other RNA
  modified_base 1: mod_base = OTHER; note = 2'-fluoro modified nucleotide with phosphorothioate linkage
  modified_base 2: mod_base = OTHER; note = 2'-O-methyl modified nucleotide with phosphorothioate linkage
  modified_base 3: mod_base = OTHER; note = 2'-fluoro modified nucleotide
  modified_base 4: mod_base = OTHER; note = 2'-O-methyl modified nucleotide
  modified_base 5: mod_base = OTHER; note = 2'-fluoro modified nucleotide
  modified_base 6: mod_base = OTHER; note = 2'-O-methyl modified nucleotide
  modified_base 7: mod_base = OTHER; note = 2'-fluoro modified nucleotide
  modified_base 8: mod_base = OTHER; note = 2'-O-methyl modified nucleotide
  modified_base 9: mod_base = OTHER; note = 2'-fluoro modified nucleotide
  modified_base 10: mod_base = OTHER; note = 2'-O-methyl modified nucleotide
  modified_base 11: mod_base = OTHER; note = 2'-fluoro modified nucleotide
  modified_base 12: mod_base = OTHER; note = 2'-O-methyl modified nucleotide
  modified_base 13: mod_base = OTHER; note = 2'-fluoro modified nucleotide with phosphorothioate linkage
  modified_base 14: mod_base = OTHER; note = 2'-O-methyl modified nucleotide with phosphorothioate linkage
  misc_difference 15: note = 2'-fluoro modified nucleotide may be attached to trivalent N-Acetylgalactosamine
ctttatattgctgta

SEQ ID NO: 897 - RNA, 15 nt, synthetic construct
  source 1..15: mol_type = other RNA
  modified_base 1: mod_base = OTHER; note = 2'-fluoro modified nucleotide with phosphorothioate linkage
  modified_base 2: mod_base = OTHER; note = 2'-O-methyl modified nucleotide with phosphorothioate linkage
  modified_base 3: mod_base = OTHER; note = 2'-fluoro modified nucleotide
  modified_base 4: mod_base = OTHER; note = 2'-O-methyl modified nucleotide
  modified_base 5: mod_base = OTHER; note = 2'-fluoro modified nucleotide
  modified_base 6: mod_base = OTHER; note = 2'-O-methyl modified nucleotide
  modified_base 7: mod_base = OTHER; note = 2'-fluoro modified nucleotide
  modified_base 8: mod_base = OTHER; note = 2'-O-methyl modified nucleotide
  modified_base 9: mod_base = OTHER; note = 2'-fluoro modified nucleotide
  modified_base 10: mod_base = OTHER; note = 2'-O-methyl modified nucleotide
  modified_base 11: mod_base = OTHER; note = 2'-fluoro modified nucleotide
  modified_base 12: mod_base = OTHER; note = 2'-O-methyl modified nucleotide
  modified_base 13: mod_base = OTHER; note = 2'-fluoro modified nucleotide with phosphorothioate linkage
  modified_base 14: mod_base = OTHER; note = 2'-O-methyl modified nucleotide with phosphorothioate linkage
  misc_difference 15: note = 2'-fluoro modified nucleotide may be attached to trivalent N-Acetylgalactosamine
taacctatgacaata

SEQ ID NO: 898 - RNA, 15 nt, synthetic construct
  source 1..15: mol_type = other RNA
  modified_base 1: mod_base = OTHER; note = 2'-fluoro modified nucleotide with phosphorothioate linkage
  modified_base 2: mod_base = OTHER; note = 2'-O-methyl modified nucleotide with phosphorothioate linkage
  modified_base 3: mod_base = OTHER; note = 2'-fluoro modified nucleotide
  modified_base 4: mod_base = OTHER; note = 2'-O-methyl modified nucleotide
  modified_base 5: mod_base = OTHER; note = 2'-fluoro modified nucleotide
  modified_base 6: mod_base = OTHER; note = 2'-O-methyl modified nucleotide
  modified_base 7: mod_base = OTHER; note = 2'-fluoro modified nucleotide
  modified_base 8: mod_base = OTHER; note = 2'-O-methyl modified nucleotide
  modified_base 9: mod_base = OTHER; note = 2'-fluoro modified nucleotide
  modified_base 10: mod_base = OTHER; note = 2'-O-methyl modified nucleotide
  modified_base 11: mod_base = OTHER; note = 2'-fluoro modified nucleotide
  modified_base 12: mod_base = OTHER; note = 2'-O-methyl modified nucleotide
  modified_base 13: mod_base = OTHER; note = 2'-fluoro modified nucleotide with phosphorothioate linkage
  modified_base 14: mod_base = OTHER; note = 2'-O-methyl modified nucleotide with phosphorothioate linkage
  misc_difference 15: note = 2'-fluoro modified nucleotide may be attached to trivalent N-Acetylgalactosamine
tgacaaaataactca

SEQ ID NO: 899 - RNA, 15 nt, synthetic construct
  source 1..15: mol_type = other RNA
  modified_base 1: mod_base = OTHER; note = 2'-fluoro modified nucleotide with phosphorothioate linkage
  modified_base 2: mod_base = OTHER; note = 2'-O-methyl modified nucleotide with phosphorothioate linkage
  modified_base 3: mod_base = OTHER; note = 2'-fluoro modified nucleotide
  modified_base 4: mod_base = OTHER; note = 2'-O-methyl modified nucleotide
  modified_base 5: mod_base = OTHER; note = 2'-fluoro modified nucleotide
  modified_base 6: mod_base = OTHER; note = 2'-O-methyl modified nucleotide
  modified_base 7: mod_base = OTHER; note = 2'-fluoro modified nucleotide
  modified_base 8: mod_base = OTHER; note = 2'-O-methyl modified nucleotide
  modified_base 9: mod_base = OTHER; note = 2'-fluoro modified nucleotide
  modified_base 10: mod_base = OTHER; note = 2'-O-methyl modified nucleotide
  modified_base 11: mod_base = OTHER; note = 2'-fluoro modified nucleotide
  modified_base 12: mod_base = OTHER; note = 2'-O-methyl modified nucleotide
  modified_base 13: mod_base = OTHER; note = 2'-fluoro modified nucleotide with phosphorothioate linkage
  modified_base 14: mod_base = OTHER; note = 2'-O-methyl modified nucleotide with phosphorothioate linkage
  misc_difference 15: note = 2'-fluoro modified nucleotide may be attached to trivalent N-Acetylgalactosamine
acaaaataactcaca

SEQ ID NO: 900 - RNA, 15 nt, synthetic construct
  source 1..15: mol_type = other RNA
  modified_base 1: mod_base = OTHER; note = 2'-fluoro modified nucleotide with phosphorothioate linkage
  modified_base 2: mod_base = OTHER; note = 2'-O-methyl modified nucleotide with phosphorothioate linkage
  modified_base 3: mod_base = OTHER; note = 2'-fluoro modified nucleotide
  modified_base 4: mod_base = OTHER; note = 2'-O-methyl modified nucleotide
  modified_base 5: mod_base = OTHER; note = 2'-fluoro modified nucleotide
  modified_base 6: mod_base = OTHER; note = 2'-O-methyl modified nucleotide
  modified_base 7: mod_base = OTHER; note = 2'-fluoro modified nucleotide
  modified_base 8: mod_base = OTHER; note = 2'-O-methyl modified nucleotide
  modified_base 9: mod_base = OTHER; note = 2'-fluoro modified nucleotide
  modified_base 10: mod_base = OTHER; note = 2'-O-methyl modified nucleotide
  modified_base 11: mod_base = OTHER; note = 2'-fluoro modified nucleotide
  modified_base 12: mod_base = OTHER; note = 2'-O-methyl modified nucleotide
  modified_base 13: mod_base = OTHER; note = 2'-fluoro modified nucleotide with phosphorothioate linkage
  modified_base 14: mod_base = OTHER; note = 2'-O-methyl modified nucleotide with phosphorothioate linkage
  misc_difference 15: note = 2'-fluoro modified nucleotide may be attached to trivalent N-Acetylgalactosamine
gacaaaataactcaa

SEQ ID NO: 901 - RNA, 15 nt, synthetic construct
  source 1..15: mol_type = other RNA
  modified_base 1: mod_base = OTHER; note = 2'-fluoro modified nucleotide with phosphorothioate linkage
  modified_base 2: mod_base = OTHER; note = 2'-O-methyl modified nucleotide with phosphorothioate linkage
  modified_base 3: mod_base = OTHER; note = 2'-fluoro modified nucleotide
  modified_base 4: mod_base = OTHER; note = 2'-O-methyl modified nucleotide
  modified_base 5: mod_base = OTHER; note = 2'-fluoro modified nucleotide
  modified_base 6: mod_base = OTHER; note = 2'-O-methyl modified nucleotide
  modified_base 7: mod_base = OTHER; note = 2'-fluoro modified nucleotide
  modified_base 8: mod_base = OTHER; note = 2'-O-methyl modified nucleotide
  modified_base 9: mod_base = OTHER; note = 2'-fluoro modified nucleotide
  modified_base 10: mod_base = OTHER; note = 2'-O-methyl modified nucleotide
  modified_base 11: mod_base = OTHER; note = 2'-fluoro modified nucleotide
  modified_base 12: mod_base = OTHER; note = 2'-O-methyl modified nucleotide
  modified_base 13: mod_base = OTHER; note = 2'-fluoro modified nucleotide with phosphorothioate linkage
  modified_base 14: mod_base = OTHER; note = 2'-O-methyl modified nucleotide with phosphorothioate linkage
  misc_difference 15: note = 2'-fluoro modified nucleotide may be attached to trivalent N-Acetylgalactosamine
tttcaaggaaaatta

SEQ ID NO: 902 - RNA, 15 nt, synthetic construct
  source 1..15: mol_type = other RNA
  modified_base 1: mod_base = OTHER; note = 2'-fluoro modified nucleotide with phosphorothioate linkage
  modified_base 2: mod_base = OTHER; note = 2'-O-methyl modified nucleotide with phosphorothioate linkage
  modified_base 3: mod_base = OTHER; note = 2'-fluoro modified nucleotide
  modified_base 4: mod_base = OTHER; note = 2'-O-methyl modified nucleotide
  modified_base 5: mod_base = OTHER; note = 2'-fluoro modified nucleotide
  modified_base 6: mod_base = OTHER; note = 2'-O-methyl modified nucleotide
  modified_base 7: mod_base = OTHER; note = 2'-fluoro modified nucleotide
  modified_base 8: mod_base = OTHER; note = 2'-O-methyl modified nucleotide
  modified_base 9: mod_base = OTHER; note = 2'-fluoro modified nucleotide
  modified_base 10: mod_base = OTHER; note = 2'-O-methyl modified nucleotide
  modified_base 11: mod_base = OTHER; note = 2'-fluoro modified nucleotide
  modified_base 12: mod_base = OTHER; note = 2'-O-methyl modified nucleotide
  modified_base 13: mod_base = OTHER; note = 2'-fluoro modified nucleotide with phosphorothioate linkage
  modified_base 14: mod_base = OTHER; note = 2'-O-methyl modified nucleotide with phosphorothioate linkage
  misc_difference 15: note = 2'-fluoro modified nucleotide may be attached to trivalent N-Acetylgalactosamine
tattgctgtaacaga

SEQ ID NO: 903 - RNA, 15 nt, synthetic construct
  source 1..15: mol_type = other RNA
  modified_base 1: mod_base = OTHER; note = 2'-fluoro modified nucleotide with phosphorothioate linkage
  modified_base 2: mod_base = OTHER; note = 2'-O-methyl modified nucleotide with phosphorothioate linkage
  modified_base 3: mod_base = OTHER; note = 2'-fluoro modified nucleotide
  modified_base 4: mod_base = OTHER; note = 2'-O-methyl modified nucleotide
  modified_base 5: mod_base = OTHER; note = 2'-fluoro modified nucleotide
  modified_base 6: mod_base = OTHER; note = 2'-O-methyl modified nucleotide
  modified_base 7: mod_base = OTHER; note = 2'-fluoro modified nucleotide
  modified_base 8: mod_base = OTHER; note = 2'-O-methyl modified nucleotide
  modified_base 9: mod_base = OTHER; note = 2'-fluoro modified nucleotide
  modified_base 10: mod_base = OTHER; note = 2'-O-methyl modified nucleotide
  modified_base 11: mod_base = OTHER; note = 2'-fluoro modified nucleotide
  modified_base 12: mod_base = OTHER; note = 2'-O-methyl modified nucleotide
  modified_base 13: mod_base = OTHER; note = 2'-fluoro modified nucleotide with phosphorothioate linkage
  modified_base 14: mod_base = OTHER; note = 2'-O-methyl modified nucleotide with phosphorothioate linkage
  misc_difference 15: note = 2'-fluoro modified nucleotide may be attached to trivalent N-Acetylgalactosamine
tatgacaatggatta

SEQ ID NO: 904 - RNA, 15 nt, synthetic construct
  source 1..15: mol_type = other RNA
  modified_base 1: mod_base = OTHER; note = 2'-fluoro modified nucleotide with phosphorothioate linkage
  modified_base 2: mod_base = OTHER; note = 2'-O-methyl modified nucleotide with phosphorothioate linkage
  modified_base 3: mod_base = OTHER; note = 2'-fluoro modified nucleotide
  modified_base 4: mod_base = OTHER; note = 2'-O-methyl modified nucleotide
  modified_base 5: mod_base = OTHER; note = 2'-fluoro modified nucleotide
  modified_base 6: mod_base = OTHER; note = 2'-O-methyl modified nucleotide
  modified_base 7: mod_base = OTHER; note = 2'-fluoro modified nucleotide
  modified_base 8: mod_base = OTHER; note = 2'-O-methyl modified nucleotide
  modified_base 9: mod_base = OTHER; note = 2'-fluoro modified nucleotide
  modified_base 10: mod_base = OTHER; note = 2'-O-methyl modified nucleotide
  modified_base 11: mod_base = OTHER; note = 2'-fluoro modified nucleotide
  modified_base 12: mod_base = OTHER; note = 2'-O-methyl modified nucleotide
  modified_base 13: mod_base = OTHER; note = 2'-fluoro modified nucleotide with phosphorothioate linkage
  modified_base 14: mod_base = OTHER; note = 2'-O-methyl modified nucleotide with phosphorothioate linkage
  misc_difference 15: note = 2'-fluoro modified nucleotide may be attached to trivalent N-Acetylgalactosamine
ctatgacaatggata

SEQ ID NO: 905 - RNA, 15 nt, synthetic construct
  source 1..15: mol_type = other RNA
  modified_base 1: mod_base = OTHER; note = 2'-fluoro modified nucleotide with phosphorothioate linkage
  modified_base 2: mod_base = OTHER; note = 2'-O-methyl modified nucleotide with phosphorothioate linkage
  modified_base 3: mod_base = OTHER; note = 2'-fluoro modified nucleotide
  modified_base 4: mod_base = OTHER; note = 2'-O-methyl modified nucleotide
  modified_base 5: mod_base = OTHER; note = 2'-fluoro modified nucleotide
  modified_base 6: mod_base = OTHER; note = 2'-O-methyl modified nucleotide
  modified_base 7: mod_base = OTHER; note = 2'-fluoro modified nucleotide
  modified_base 8: mod_base = OTHER; note = 2'-O-methyl modified nucleotide
  modified_base 9: mod_base = OTHER; note = 2'-fluoro modified nucleotide
  modified_base 10: mod_base = OTHER; note = 2'-O-methyl modified nucleotide
  modified_base 11: mod_base = OTHER; note = 2'-fluoro modified nucleotide
  modified_base 12: mod_base = OTHER; note = 2'-O-methyl modified nucleotide
  modified_base 13: mod_base = OTHER; note = 2'-fluoro modified nucleotide with phosphorothioate linkage
  modified_base 14: mod_base = OTHER; note = 2'-O-methyl modified nucleotide with phosphorothioate linkage
  misc_difference 15: note = 2'-fluoro modified nucleotide may be attached to trivalent N-Acetylgalactosamine
gacaatggatttcta

SEQ ID NO: 906 - RNA, 15 nt, synthetic construct
  source 1..15: mol_type = other RNA
  modified_base 1: mod_base = OTHER; note = 2'-fluoro modified nucleotide with phosphorothioate linkage
  modified_base 2: mod_base = OTHER; note = 2'-O-methyl modified nucleotide with phosphorothioate linkage
  modified_base 3: mod_base = OTHER; note = 2'-fluoro modified nucleotide
  modified_base 4: mod_base = OTHER; note = 2'-O-methyl modified nucleotide
  modified_base 5: mod_base = OTHER; note = 2'-fluoro modified nucleotide
  modified_base 6: mod_base = OTHER; note = 2'-O-methyl modified nucleotide
  modified_base 7: mod_base = OTHER; note = 2'-fluoro modified nucleotide
  modified_base 8: mod_base = OTHER; note = 2'-O-methyl modified nucleotide
  modified_base 9: mod_base = OTHER; note = 2'-fluoro modified nucleotide
  modified_base 10: mod_base = OTHER; note = 2'-O-methyl modified nucleotide
  modified_base 11: mod_base = OTHER; note = 2'-fluoro modified nucleotide
  modified_base 12: mod_base = OTHER; note = 2'-O-methyl modified nucleotide
  modified_base 13: mod_base = OTHER; note = 2'-fluoro modified nucleotide with phosphorothioate linkage
  modified_base 14: mod_base = OTHER; note = 2'-O-methyl modified nucleotide with phosphorothioate linkage
  misc_difference 15: note = 2'-fluoro modified nucleotide may be attached to trivalent N-Acetylgalactosamine
taaagaatatgtcta

SEQ ID NO: 907 - RNA, 15 nt, synthetic construct
  source 1..15: mol_type = other RNA
  modified_base 1: mod_base = OTHER; note = 2'-fluoro modified nucleotide with phosphorothioate linkage
  modified_base 2: mod_base = OTHER; note = 2'-O-methyl modified nucleotide with phosphorothioate linkage
  modified_base 3: mod_base = OTHER; note = 2'-fluoro modified nucleotide
  modified_base 4: mod_base = OTHER; note = 2'-O-methyl modified nucleotide
  modified_base 5: mod_base = OTHER; note = 2'-fluoro modified nucleotide
  modified_base 6: mod_base = OTHER; note = 2'-O-methyl modified nucleotide
  modified_base 7: mod_base = OTHER; note = 2'-fluoro modified nucleotide
  modified_base 8: mod_base = OTHER; note = 2'-O-methyl modified nucleotide
  modified_base 9: mod_base = OTHER; note = 2'-fluoro modified nucleotide
  modified_base 10: mod_base = OTHER; note = 2'-O-methyl modified nucleotide
  modified_base 11: mod_base = OTHER; note = 2'-fluoro modified nucleotide
  modified_base 12: mod_base = OTHER; note = 2'-O-methyl modified nucleotide
  modified_base 13: mod_base = OTHER; note = 2'-fluoro modified nucleotide with phosphorothioate linkage
  modified_base 14: mod_base = OTHER; note = 2'-O-methyl modified nucleotide with phosphorothioate linkage
  misc_difference 15: note = 2'-fluoro modified nucleotide may be attached to trivalent N-Acetylgalactosamine
agggaatctgcacta

SEQ ID NO: 908 - RNA, 15 nt, synthetic construct
  source 1..15: mol_type = other RNA
  modified_base 1: mod_base = OTHER; note = 2'-fluoro modified nucleotide with phosphorothioate linkage
  modified_base 2: mod_base = OTHER; note = 2'-O-methyl modified nucleotide with phosphorothioate linkage
  modified_base 3: mod_base = OTHER; note = 2'-fluoro modified nucleotide
  modified_base 4: mod_base = OTHER; note = 2'-O-methyl modified nucleotide
  modified_base 5: mod_base = OTHER; note = 2'-fluoro modified nucleotide
  modified_base 6: mod_base = OTHER; note = 2'-O-methyl modified nucleotide
  modified_base 7: mod_base = OTHER; note = 2'-fluoro modified nucleotide
  modified_base 8: mod_base = OTHER; note = 2'-O-methyl modified nucleotide
  modified_base 9: mod_base = OTHER; note = 2'-fluoro modified nucleotide
  modified_base 10: mod_base = OTHER; note = 2'-O-methyl modified nucleotide
  modified_base 11: mod_base = OTHER; note = 2'-fluoro modified nucleotide
  modified_base 12: mod_base = OTHER; note = 2'-O-methyl modified nucleotide
  modified_base 13: mod_base = OTHER; note = 2'-fluoro modified nucleotide with phosphorothioate linkage
  modified_base 14: mod_base = OTHER; note = 2'-O-methyl modified nucleotide with phosphorothioate linkage
  misc_difference 15: note = 2'-fluoro modified nucleotide may be attached to trivalent N-Acetylgalactosamine
cctatgacaatggaa

SEQ ID NO: 909 - RNA, 15 nt, synthetic construct
  source 1..15: mol_type = other RNA
  modified_base 1: mod_base = OTHER; note = 2'-fluoro modified nucleotide with phosphorothioate linkage
  modified_base 2: mod_base = OTHER; note = 2'-O-methyl modified nucleotide with phosphorothioate linkage
  modified_base 3: mod_base = OTHER; note = 2'-fluoro modified nucleotide
  modified_base 4: mod_base = OTHER; note = 2'-O-methyl modified nucleotide
  modified_base 5: mod_base = OTHER; note = 2'-fluoro modified nucleotide
  modified_base 6: mod_base = OTHER; note = 2'-O-methyl modified nucleotide
  modified_base 7: mod_base = OTHER; note = 2'-fluoro modified nucleotide
  modified_base 8: mod_base = OTHER; note = 2'-O-methyl modified nucleotide
  modified_base 9: mod_base = OTHER; note = 2'-fluoro modified nucleotide
  modified_base 10: mod_base = OTHER; note = 2'-O-methyl modified nucleotide
  modified_base 11: mod_base = OTHER; note = 2'-fluoro modified nucleotide
  modified_base 12: mod_base = OTHER; note = 2'-O-methyl modified nucleotide
  modified_base 13: mod_base = OTHER; note = 2'-fluoro modified nucleotide with phosphorothioate linkage
  modified_base 14: mod_base = OTHER; note = 2'-O-methyl modified nucleotide with phosphorothioate linkage
  misc_difference 15: note = 2'-fluoro modified nucleotide may be attached to trivalent N-Acetylgalactosamine
tgttcaaagatgtca

SEQ ID NO: 910 - RNA, 15 nt, synthetic construct
  source 1..15: mol_type = other RNA
  modified_base 1: mod_base = OTHER; note = 2'-fluoro modified nucleotide with phosphorothioate linkage
  modified_base 2: mod_base = OTHER; note = 2'-O-methyl modified nucleotide with phosphorothioate linkage
  modified_base 3: mod_base = OTHER; note = 2'-fluoro modified nucleotide
  modified_base 4: mod_base = OTHER; note = 2'-O-methyl modified nucleotide
  modified_base 5: mod_base = OTHER; note = 2'-fluoro modified nucleotide
  modified_base 6: mod_base = OTHER; note = 2'-O-methyl modified nucleotide
  modified_base 7: mod_base = OTHER; note = 2'-fluoro modified nucleotide
  modified_base 8: mod_base = OTHER; note = 2'-O-methyl modified nucleotide
  modified_base 9: mod_base = OTHER; note = 2'-fluoro modified nucleotide
  modified_base 10: mod_base = OTHER; note = 2'-O-methyl modified nucleotide
  modified_base 11: mod_base = OTHER; note = 2'-fluoro modified nucleotide
  modified_base 12: mod_base = OTHER; note = 2'-O-methyl modified nucleotide
  modified_base 13: mod_base = OTHER; note = 2'-fluoro modified nucleotide with phosphorothioate linkage
  modified_base 14: mod_base = OTHER; note = 2'-O-methyl modified nucleotide with phosphorothioate linkage
  misc_difference 15: note = 2'-fluoro modified nucleotide may be attached to trivalent N-Acetylgalactosamine
aacctatgacaatga

SEQ ID NO: 911 - RNA, 15 nt, synthetic construct
  source 1..15: mol_type = other RNA
  modified_base 1: mod_base = OTHER; note = 2'-fluoro modified nucleotide with phosphorothioate linkage
  modified_base 2: mod_base = OTHER; note = 2'-O-methyl modified nucleotide with phosphorothioate linkage
  modified_base 3: mod_base = OTHER; note = 2'-fluoro modified nucleotide
  modified_base 4: mod_base = OTHER; note = 2'-O-methyl modified nucleotide
  modified_base 5: mod_base = OTHER; note = 2'-fluoro modified nucleotide
  modified_base 6: mod_base = OTHER; note = 2'-O-methyl modified nucleotide
  modified_base 7: mod_base = OTHER; note = 2'-fluoro modified nucleotide
  modified_base 8: mod_base = OTHER; note = 2'-O-methyl modified nucleotide
  modified_base 9: mod_base = OTHER; note = 2'-fluoro modified nucleotide
  modified_base 10: mod_base = OTHER; note = 2'-O-methyl modified nucleotide
  modified_base 11: mod_base = OTHER; note = 2'-fluoro modified nucleotide
  modified_base 12: mod_base = OTHER; note = 2'-O-methyl modified nucleotide
  modified_base 13: mod_base = OTHER; note = 2'-fluoro modified nucleotide with phosphorothioate linkage
  modified_base 14: mod_base = OTHER; note = 2'-O-methyl modified nucleotide with phosphorothioate linkage
  misc_difference 15: note = 2'-fluoro modified nucleotide may be attached to trivalent N-Acetylgalactosamine
atggatttctcttca

SEQ ID NO: 912 - RNA, 15 nt, synthetic construct
  source 1..15: mol_type = other RNA
  modified_base 1: mod_base = OTHER; note = 2'-fluoro modified nucleotide with phosphorothioate linkage
  modified_base 2: mod_base = OTHER; note = 2'-O-methyl modified nucleotide with phosphorothioate linkage
  modified_base 3: mod_base = OTHER; note = 2'-fluoro modified nucleotide
  modified_base 4: mod_base = OTHER; note = 2'-O-methyl modified nucleotide
  modified_base 5: mod_base = OTHER; note = 2'-fluoro modified nucleotide
  modified_base 6: mod_base = OTHER; note = 2'-O-methyl modified nucleotide
  modified_base 7: mod_base = OTHER; note = 2'-fluoro modified nucleotide
  modified_base 8: mod_base = OTHER; note = 2'-O-methyl modified nucleotide
  modified_base 9: mod_base = OTHER; note = 2'-fluoro modified nucleotide
  modified_base 10: mod_base = OTHER; note = 2'-O-methyl modified nucleotide
  modified_base 11: mod_base = OTHER; note = 2'-fluoro modified nucleotide
  modified_base 12: mod_base = OTHER; note = 2'-O-methyl modified nucleotide
  modified_base 13: mod_base = OTHER; note = 2'-fluoro modified nucleotide with phosphorothioate linkage
  modified_base 14: mod_base = OTHER; note = 2'-O-methyl modified nucleotide with phosphorothioate linkage
  misc_difference 15: note = 2'-fluoro modified nucleotide may be attached to trivalent N-Acetylgalactosamine
gttaaagaatatgta

SEQ ID NO: 913 - RNA, 15 nt, synthetic construct
  source 1..15: mol_type = other RNA
  modified_base 1: mod_base = OTHER; note = 2'-fluoro modified nucleotide with phosphorothioate linkage
  modified_base 2: mod_base = OTHER; note = 2'-O-methyl modified nucleotide with phosphorothioate linkage
  modified_base 3: mod_base = OTHER; note = 2'-fluoro modified nucleotide
  modified_base 4: mod_base = OTHER; note = 2'-O-methyl modified nucleotide
  modified_base 5: mod_base = OTHER; note = 2'-fluoro modified nucleotide
  modified_base 6: mod_base = OTHER; note = 2'-O-methyl modified nucleotide
  modified_base 7: mod_base = OTHER; note = 2'-fluoro modified nucleotide
  modified_base 8: mod_base = OTHER; note = 2'-O-methyl modified nucleotide
  modified_base 9: mod_base = OTHER; note = 2'-fluoro modified nucleotide
  modified_base 10: mod_base = OTHER; note = 2'-O-methyl modified nucleotide
  modified_base 11: mod_base = OTHER; note = 2'-fluoro modified nucleotide
  modified_base 12: mod_base = OTHER; note = 2'-O-methyl modified nucleotide
  modified_base 13: mod_base = OTHER; note = 2'-fluoro modified nucleotide with phosphorothioate linkage
  modified_base 14: mod_base = OTHER; note = 2'-O-methyl modified nucleotide with phosphorothioate linkage
  misc_difference 15: note = 2'-fluoro modified nucleotide may be attached to trivalent N-Acetylgalactosamine
agtgtaaaaggacta

SEQ ID NO: 914 - RNA, 15 nt, synthetic construct
  source 1..15: mol_type = other RNA
  modified_base 1: mod_base = OTHER; note = 2'-fluoro modified nucleotide with phosphorothioate linkage
  modified_base 2: mod_base = OTHER; note = 2'-O-methyl modified nucleotide with phosphorothioate linkage
  modified_base 3: mod_base = OTHER; note = 2'-fluoro modified nucleotide
  modified_base 4: mod_base = OTHER; note = 2'-O-methyl modified nucleotide
  modified_base 5: mod_base = OTHER; note = 2'-fluoro modified nucleotide
  modified_base 6: mod_base = OTHER; note = 2'-O-methyl modified nucleotide
  modified_base 7: mod_base = OTHER; note = 2'-fluoro modified nucleotide
  modified_base 8: mod_base = OTHER; note = 2'-O-methyl modified nucleotide
  modified_base 9: mod_base = OTHER; note = 2'-fluoro modified nucleotide
  modified_base 10: mod_base = OTHER; note = 2'-O-methyl modified nucleotide
  modified_base 11: mod_base = OTHER; note = 2'-fluoro modified nucleotide
  modified_base 12: mod_base = OTHER; note = 2'-O-methyl modified nucleotide
  modified_base 13: mod_base = OTHER; note = 2'-fluoro modified nucleotide with phosphorothioate linkage
  modified_base 14: mod_base = OTHER; note = 2'-O-methyl modified nucleotide with phosphorothioate linkage
  misc_difference 15: note = 2'-fluoro modified nucleotide may be attached to trivalent N-Acetylgalactosamine
ctttcaaggaaaata

SEQ ID NO: 915 - RNA, 15 nt, synthetic construct
  source 1..15: mol_type = other RNA
  modified_base 1: mod_base = OTHER; note = 2'-fluoro modified nucleotide with phosphorothioate linkage
  modified_base 2: mod_base = OTHER; note = 2'-O-methyl modified nucleotide with phosphorothioate linkage
  modified_base 3: mod_base = OTHER; note = 2'-fluoro modified nucleotide
  modified_base 4: mod_base = OTHER; note = 2'-O-methyl modified nucleotide
  modified_base 5: mod_base = OTHER; note = 2'-fluoro modified nucleotide
  modified_base 6: mod_base = OTHER; note = 2'-O-methyl modified nucleotide
  modified_base 7: mod_base = OTHER; note = 2'-fluoro modified nucleotide
  modified_base 8: mod_base = OTHER; note = 2'-O-methyl modified nucleotide
  modified_base 9: mod_base = OTHER; note = 2'-fluoro modified nucleotide
  modified_base 10: mod_base = OTHER; note = 2'-O-methyl modified nucleotide
  modified_base 11: mod_base = OTHER; note = 2'-fluoro modified nucleotide
  modified_base 12: mod_base = OTHER; note = 2'-O-methyl modified nucleotide
  modified_base 13: mod_base = OTHER; note = 2'-fluoro modified nucleotide with phosphorothioate linkage
  modified_base 14: mod_base = OTHER; note = 2'-O-methyl modified nucleotide with phosphorothioate linkage
  misc_difference 15: note = 2'-fluoro modified nucleotide may be attached to trivalent N-Acetylgalactosamine
taaaatacaatttca

SEQ ID NO: 916 - RNA, 15 nt, synthetic construct
  source 1..15: mol_type = other RNA
  modified_base 1: mod_base = OTHER; note = 2'-fluoro modified nucleotide with phosphorothioate linkage
  modified_base 2: mod_base = OTHER; note = 2'-O-methyl modified nucleotide with phosphorothioate linkage
  modified_base 3: mod_base = OTHER; note = 2'-fluoro modified nucleotide
  modified_base 4: mod_base = OTHER; note = 2'-O-methyl modified nucleotide
  modified_base 5: mod_base = OTHER; note = 2'-fluoro modified nucleotide
  modified_base 6: mod_base = OTHER; note = 2'-O-methyl modified nucleotide
  modified_base 7: mod_base = OTHER; note = 2'-fluoro modified nucleotide
  modified_base 8: mod_base = OTHER; note = 2'-O-methyl modified nucleotide
  modified_base 9: mod_base = OTHER; note = 2'-fluoro modified nucleotide
  modified_base 10: mod_base = OTHER; note = 2'-O-methyl modified nucleotide
  modified_base 11: mod_base = OTHER; note = 2'-fluoro modified nucleotide
  modified_base 12: mod_base = OTHER; note = 2'-O-methyl modified nucleotide
  modified_base 13: mod_base = OTHER; note = 2'-fluoro modified nucleotide with phosphorothioate linkage
  modified_base 14: mod_base = OTHER; note = 2'-O-methyl modified nucleotide with phosphorothioate linkage
  misc_difference 15: note = 2'-fluoro modified nucleotide may be attached to trivalent N-Acetylgalactosamine
aattttgaaattaca

SEQ ID NO: 917 - RNA, 15 nt, synthetic construct
  source 1..15: mol_type = other RNA
  modified_base 1: mod_base = OTHER; note = 2'-fluoro modified nucleotide with phosphorothioate linkage
  modified_base 2: mod_base = OTHER; note = 2'-O-methyl modified nucleotide with phosphorothioate linkage
  modified_base 3: mod_base = OTHER; note = 2'-fluoro modified nucleotide
  modified_base 4: mod_base = OTHER; note = 2'-O-methyl modified nucleotide
  modified_base 5: mod_base = OTHER; note = 2'-fluoro modified nucleotide
  modified_base 6: mod_base = OTHER; note = 2'-O-methyl modified nucleotide
  modified_base 7: mod_base = OTHER; note = 2'-fluoro modified nucleotide
  modified_base 8: mod_base = OTHER; note = 2'-O-methyl modified nucleotide
  modified_base 9: mod_base = OTHER; note = 2'-fluoro modified nucleotide
  modified_base 10: mod_base = OTHER; note = 2'-O-methyl modified nucleotide
  modified_base 11: mod_base = OTHER; note = 2'-fluoro modified nucleotide
  modified_base 12: mod_base = OTHER; note = 2'-O-methyl modified nucleotide
  modified_base 13: mod_base = OTHER; note = 2'-fluoro modified nucleotide with phosphorothioate linkage
  modified_base 14: mod_base = OTHER; note = 2'-O-methyl modified nucleotide with phosphorothioate linkage
  misc_difference 15: note = 2'-fluoro modified nucleotide may be attached to trivalent N-Acetylgalactosamine
actttaagaatttta

SEQ ID NO: 918 - RNA, 15 nt, synthetic construct
  source 1..15: mol_type = other RNA
  modified_base 1: mod_base = OTHER; note = 2'-fluoro modified nucleotide with phosphorothioate linkage
  modified_base 2: mod_base = OTHER; note = 2'-O-methyl modified nucleotide with phosphorothioate linkage
  modified_base 3: mod_base = OTHER; note = 2'-fluoro modified nucleotide
  modified_base 4: mod_base = OTHER; note = 2'-O-methyl modified nucleotide
  modified_base 5: mod_base = OTHER; note = 2'-fluoro modified nucleotide
  modified_base 6: mod_base = OTHER; note = 2'-O-methyl modified nucleotide
  modified_base 7: mod_base = OTHER; note = 2'-fluoro modified nucleotide
  modified_base 8: mod_base = OTHER; note = 2'-O-methyl modified nucleotide
  modified_base 9: mod_base = OTHER; note = 2'-fluoro modified nucleotide
  modified_base 10: mod_base = OTHER; note = 2'-O-methyl modified nucleotide
  modified_base 11: mod_base = OTHER; note = 2'-fluoro modified nucleotide
  modified_base 12: mod_base = OTHER; note = 2'-O-methyl modified nucleotide
  modified_base 13: mod_base = OTHER; note = 2'-fluoro modified nucleotide with phosphorothioate linkage
  modified_base 14: mod_base = OTHER; note = 2'-O-methyl modified nucleotide with phosphorothioate linkage
  misc_difference 15: note = 2'-fluoro modified nucleotide may be attached to trivalent N-Acetylgalactosamine
cagaaccaaaattca

SEQ ID NO: 919 - RNA, 15 nt, synthetic construct
  source 1..15: mol_type = other RNA
  modified_base 1: mod_base = OTHER; note = 2'-fluoro modified nucleotide with phosphorothioate linkage
  modified_base 2: mod_base = OTHER; note = 2'-O-methyl modified nucleotide with phosphorothioate linkage
  modified_base 3: mod_base = OTHER; note = 2'-fluoro modified nucleotide
  modified_base 4: mod_base = OTHER; note = 2'-O-methyl modified nucleotide
  modified_base 5: mod_base = OTHER; note = 2'-fluoro modified nucleotide
  modified_base 6: mod_base = OTHER; note = 2'-O-methyl modified nucleotide
  modified_base 7: mod_base = OTHER; note = 2'-fluoro modified nucleotide
  modified_base 8: mod_base = OTHER; note = 2'-O-methyl modified nucleotide
  modified_base 9: mod_base = OTHER; note = 2'-fluoro modified nucleotide
  modified_base 10: mod_base = OTHER; note = 2'-O-methyl modified nucleotide
  modified_base 11: mod_base = OTHER; note = 2'-fluoro modified nucleotide
  modified_base 12: mod_base = OTHER; note = 2'-O-methyl modified nucleotide
  modified_base 13: mod_base = OTHER; note = 2'-fluoro modified nucleotide with phosphorothioate linkage
  modified_base 14: mod_base = OTHER; note = 2'-O-methyl modified nucleotide with phosphorothioate linkage
  misc_difference 15: note = 2'-fluoro modified nucleotide may be attached to trivalent N-Acetylgalactosamine
aattataaaatgaca

SEQ ID NO: 920 - RNA, 15 nt, synthetic construct
  source 1..15: mol_type = other RNA
  modified_base 1: mod_base = OTHER; note = 2'-fluoro modified nucleotide with phosphorothioate linkage
  modified_base 2: mod_base = OTHER; note = 2'-O-methyl modified nucleotide with phosphorothioate linkage
  modified_base 3: mod_base = OTHER; note = 2'-fluoro modified nucleotide
  modified_base 4: mod_base = OTHER; note = 2'-O-methyl modified nucleotide
  modified_base 5: mod_base = OTHER; note = 2'-fluoro modified nucleotide
  modified_base 6: mod_base = OTHER; note = 2'-O-methyl modified nucleotide
  modified_base 7: mod_base = OTHER; note = 2'-fluoro modified nucleotide
  modified_base 8: mod_base = OTHER; note = 2'-O-methyl modified nucleotide
  modified_base 9: mod_base = OTHER; note = 2'-fluoro modified nucleotide
  modified_base 10: mod_base = OTHER; note = 2'-O-methyl modified nucleotide
  modified_base 11: mod_base = OTHER; note = 2'-fluoro modified nucleotide
  modified_base 12: mod_base = OTHER; note = 2'-O-methyl modified nucleotide
  modified_base 13: mod_base = OTHER; note = 2'-fluoro modified nucleotide with phosphorothioate linkage
  modified_base 14: mod_base = OTHER; note = 2'-O-methyl modified nucleotide with phosphorothioate linkage
  misc_difference 15: note = 2'-fluoro modified nucleotide may be attached to trivalent N-Acetylgalactosamine
cagtacaggatttga

SEQ ID NO: 921 - RNA, 15 nt, synthetic construct
  source 1..15: mol_type = other RNA
  modified_base 1: mod_base = OTHER; note = 2'-fluoro modified nucleotide with phosphorothioate linkage
  modified_base 2: mod_base = OTHER; note = 2'-O-methyl modified nucleotide with phosphorothioate linkage
  modified_base 3: mod_base = OTHER; note = 2'-fluoro modified nucleotide
  modified_base 4: mod_base = OTHER; note = 2'-O-methyl modified nucleotide
  modified_base 5: mod_base = OTHER; note = 2'-fluoro modified nucleotide
  modified_base 6: mod_base = OTHER; note = 2'-O-methyl modified nucleotide
  modified_base 7: mod_base = OTHER; note = 2'-fluoro modified nucleotide
  modified_base 8: mod_base = OTHER; note = 2'-O-methyl modified nucleotide
  modified_base 9: mod_base = OTHER; note = 2'-fluoro modified nucleotide
  modified_base 10: mod_base = OTHER; note = 2'-O-methyl modified nucleotide
  modified_base 11: mod_base = OTHER; note = 2'-fluoro modified nucleotide
  modified_base 12: mod_base = OTHER; note = 2'-O-methyl modified nucleotide
  modified_base 13: mod_base = OTHER; note = 2'-fluoro modified nucleotide with phosphorothioate linkage
  modified_base 14: mod_base = OTHER; note = 2'-O-methyl modified nucleotide with phosphorothioate linkage
  misc_difference 15: note = 2'-fluoro modified nucleotide may be attached to trivalent N-Acetylgalactosamine
tattaaaagttatca

SEQ ID NO: 922 - RNA, 15 nt, synthetic construct
  source 1..15: mol_type = other RNA
  modified_base 1: mod_base = OTHER; note = 2'-fluoro modified nucleotide with phosphorothioate linkage
  modified_base 2: mod_base = OTHER; note = 2'-O-methyl modified nucleotide with phosphorothioate linkage
  modified_base 3: mod_base = OTHER; note = 2'-fluoro modified nucleotide
  modified_base 4: mod_base = OTHER; note = 2'-O-methyl modified nucleotide
  modified_base 5: mod_base = OTHER; note = 2'-fluoro modified nucleotide
  modified_base 6: mod_base = OTHER; note = 2'-O-methyl modified nucleotide
  modified_base 7: mod_base = OTHER; note = 2'-fluoro modified nucleotide
  modified_base 8: mod_base = OTHER; note = 2'-O-methyl modified nucleotide
  modified_base 9: mod_base = OTHER; note = 2'-fluoro modified nucleotide
  modified_base 10: mod_base = OTHER; note = 2'-O-methyl modified nucleotide
  modified_base 11: mod_base = OTHER; note = 2'-fluoro modified nucleotide
  modified_base 12: mod_base = OTHER; note = 2'-O-methyl modified nucleotide
  modified_base 13: mod_base = OTHER; note = 2'-fluoro modified nucleotide with phosphorothioate linkage
  modified_base 14: mod_base = OTHER; note = 2'-O-methyl modified nucleotide with phosphorothioate linkage
  misc_difference 15: note = 2'-fluoro modified nucleotide may be attached to trivalent N-Acetylgalactosamine
aagagaagacttaaa

SEQ ID NO: 923 - RNA, 15 nt, synthetic construct
  source 1..15: mol_type = other RNA
  modified_base 1: mod_base = OTHER; note = 2'-fluoro modified nucleotide with phosphorothioate linkage
  modified_base 2: mod_base = OTHER; note = 2'-O-methyl modified nucleotide with phosphorothioate linkage
  modified_base 3: mod_base = OTHER; note = 2'-fluoro modified nucleotide
  modified_base 4: mod_base = OTHER; note = 2'-O-methyl modified nucleotide
  modified_base 5: mod_base = OTHER; note = 2'-fluoro modified nucleotide
  modified_base 6: mod_base = OTHER; note = 2'-O-methyl modified nucleotide
  modified_base 7: mod_base = OTHER; note = 2'-fluoro modified nucleotide
  modified_base 8: mod_base = OTHER; note = 2'-O-methyl modified nucleotide
  modified_base 9: mod_base = OTHER; note = 2'-fluoro modified nucleotide
  modified_base 10: mod_base = OTHER; note = 2'-O-methyl modified nucleotide
  modified_base 11: mod_base = OTHER; note = 2'-fluoro modified nucleotide
  modified_base 12: mod_base = OTHER; note = 2'-O-methyl modified nucleotide
  modified_base 13: mod_base = OTHER; note = 2'-fluoro modified nucleotide with phosphorothioate linkage
  modified_base 14: mod_base = OTHER; note = 2'-O-methyl modified nucleotide with phosphorothioate linkage
  misc_difference 15: note = 2'-fluoro modified nucleotide may be attached to trivalent N-Acetylgalactosamine
catattggaattata

SEQ ID NO: 924 - RNA, 15 nt, synthetic construct
  source 1..15: mol_type = other RNA
  modified_base 1: mod_base = OTHER; note = 2'-fluoro modified nucleotide with phosphorothioate linkage
  modified_base 2: mod_base = OTHER; note = 2'-O-methyl modified nucleotide with phosphorothioate linkage
  modified_base 3: mod_base = OTHER; note = 2'-fluoro modified nucleotide
  modified_base 4: mod_base = OTHER; note = 2'-O-methyl modified nucleotide
  modified_base 5: mod_base = OTHER; note = 2'-fluoro modified nucleotide
  modified_base 6: mod_base = OTHER; note = 2'-O-methyl modified nucleotide
  modified_base 7: mod_base = OTHER; note = 2'-fluoro modified nucleotide
  modified_base 8: mod_base = OTHER; note = 2'-O-methyl modified nucleotide
  modified_base 9: mod_base = OTHER; note = 2'-fluoro modified nucleotide
  modified_base 10: mod_base = OTHER; note = 2'-O-methyl modified nucleotide
  modified_base 11: mod_base = OTHER; note = 2'-fluoro modified nucleotide
  modified_base 12: mod_base = OTHER; note = 2'-O-methyl modified nucleotide
  modified_base 13: mod_base = OTHER; note = 2'-fluoro modified nucleotide with phosphorothioate linkage
  modified_base 14: mod_base = OTHER; note = 2'-O-methyl modified nucleotide with phosphorothioate linkage
  misc_difference 15: note = 2'-fluoro modified nucleotide may be attached to trivalent N-Acetylgalactosamine
catgttcatttatca

SEQ ID NO: 925 - RNA, 15 nt, synthetic construct
  source 1..15: mol_type = other RNA
  modified_base 1: mod_base = OTHER; note = 2'-fluoro modified nucleotide with phosphorothioate linkage
  modified_base 2: mod_base = OTHER; note = 2'-O-methyl modified nucleotide with phosphorothioate linkage
  modified_base 3: mod_base = OTHER; note = 2'-fluoro modified nucleotide
  modified_base 4: mod_base = OTHER; note = 2'-O-methyl modified nucleotide
  modified_base 5: mod_base = OTHER; note = 2'-fluoro modified nucleotide
  modified_base 6: mod_base = OTHER; note = 2'-O-methyl modified nucleotide
  modified_base 7: mod_base = OTHER; note = 2'-fluoro modified nucleotide
  modified_base 8: mod_base = OTHER; note = 2'-O-methyl modified nucleotide
  modified_base 9: mod_base = OTHER; note = 2'-fluoro modified nucleotide
  modified_base 10: mod_base = OTHER; note = 2'-O-methyl modified nucleotide
  modified_base 11: mod_base = OTHER; note = 2'-fluoro modified nucleotide
  modified_base 12: mod_base = OTHER; note = 2'-O-methyl modified nucleotide
  modified_base 13: mod_base = OTHER; note = 2'-fluoro modified nucleotide with phosphorothioate linkage
  modified_base 14: mod_base = OTHER; note = 2'-O-methyl modified nucleotide with phosphorothioate linkage
  misc_difference 15: note = 2'-fluoro modified nucleotide may be attached to trivalent N-Acetylgalactosamine
aaatgatgaacctta

SEQ ID NO: 926 - RNA, 15 nt, synthetic construct
  source 1..15: mol_type = other RNA
  modified_base 1: mod_base = OTHER; note = 2'-fluoro modified nucleotide with phosphorothioate linkage
  modified_base 2: mod_base = OTHER; note = 2'-O-methyl modified nucleotide with phosphorothioate linkage
  modified_base 3: mod_base = OTHER; note = 2'-fluoro modified nucleotide
  modified_base 4: mod_base = OTHER; note = 2'-O-methyl modified nucleotide
  modified_base 5: mod_base = OTHER; note = 2'-fluoro modified nucleotide
  modified_base 6: mod_base = OTHER; note = 2'-O-methyl modified nucleotide
  modified_base 7: mod_base = OTHER; note = 2'-fluoro modified nucleotide
  modified_base 8: mod_base = OTHER; note = 2'-O-methyl modified nucleotide
  modified_base 9: mod_base = OTHER; note = 2'-fluoro modified nucleotide
  modified_base 10: mod_base = OTHER; note = 2'-O-methyl modified nucleotide
  modified_base 11: mod_base = OTHER; note = 2'-fluoro modified nucleotide
  modified_base 12: mod_base = OTHER; note = 2'-O-methyl modified nucleotide
  modified_base 13: mod_base = OTHER; note = 2'-fluoro modified nucleotide with phosphorothioate linkage
  modified_base 14: mod_base = OTHER; note = 2'-O-methyl modified nucleotide with phosphorothioate linkage
  misc_difference 15: note = 2'-fluoro modified nucleotide may be attached to trivalent N-Acetylgalactosamine
tttatagcacttcca

SEQ ID NO: 927 - RNA, 15 nt, synthetic construct
  source 1..15: mol_type = other RNA
  modified_base 1: mod_base = OTHER; note = 2'-fluoro modified nucleotide with phosphorothioate linkage
  modified_base 2: mod_base = OTHER; note = 2'-O-methyl modified nucleotide with phosphorothioate linkage
  modified_base 3: mod_base = OTHER; note = 2'-fluoro modified nucleotide
  modified_base 4: mod_base = OTHER; note = 2'-O-methyl modified nucleotide
  modified_base 5: mod_base = OTHER; note = 2'-fluoro modified nucleotide
  modified_base 6: mod_base = OTHER; note = 2'-O-methyl modified nucleotide
  modified_base 7: mod_base = OTHER; note = 2'-fluoro modified nucleotide
  modified_base 8: mod_base = OTHER; note = 2'-O-methyl modified nucleotide
  modified_base 9: mod_base = OTHER; note = 2'-fluoro modified nucleotide
  modified_base 10: mod_base = OTHER; note = 2'-O-methyl modified nucleotide
  modified_base 11: mod_base = OTHER; note = 2'-fluoro modified nucleotide
  modified_base 12: mod_base = OTHER; note = 2'-O-methyl modified nucleotide
  modified_base 13: mod_base = OTHER; note = 2'-fluoro modified nucleotide with phosphorothioate linkage
  modified_base 14: mod_base = OTHER; note = 2'-O-methyl modified nucleotide with phosphorothioate linkage
  misc_difference 15: note = 2'-fluoro modified nucleotide may be attached to trivalent N-Acetylgalactosamine
tttaagagtacttga

SEQ ID NO: 928 - RNA, 15 nt, synthetic construct
  source 1..15: mol_type = other RNA
  modified_base 1: mod_base = OTHER; note = 2'-fluoro modified nucleotide with phosphorothioate linkage
  modified_base 2: mod_base = OTHER; note = 2'-O-methyl modified nucleotide with phosphorothioate linkage
  modified_base 3: mod_base = OTHER; note = 2'-fluoro modified nucleotide
  modified_base 4: mod_base = OTHER; note = 2'-O-methyl modified nucleotide
  modified_base 5: mod_base = OTHER; note = 2'-fluoro modified nucleotide
  modified_base 6: mod_base = OTHER; note = 2'-O-methyl modified nucleotide
  modified_base 7: mod_base = OTHER; note = 2'-fluoro modified nucleotide
  modified_base 8: mod_base = OTHER; note = 2'-O-methyl modified nucleotide
  modified_base 9: mod_base = OTHER; note = 2'-fluoro modified nucleotide
  modified_base 10: mod_base = OTHER; note = 2'-O-methyl modified nucleotide
  modified_base 11: mod_base = OTHER; note = 2'-fluoro modified nucleotide
  modified_base 12: mod_base = OTHER; note = 2'-O-methyl modified nucleotide
  modified_base 13: mod_base = OTHER; note = 2'-fluoro modified nucleotide with phosphorothioate linkage
  modified_base 14: mod_base = OTHER; note = 2'-O-methyl modified nucleotide with phosphorothioate linkage
  misc_difference 15: note = 2'-fluoro modified nucleotide may be attached to trivalent N-Acetylgalactosamine
caggaaatcattgga

SEQ ID NO: 929 - RNA, 15 nt, synthetic construct
  source 1..15: mol_type = other RNA
  modified_base 1: mod_base = OTHER; note = 2'-fluoro modified nucleotide with phosphorothioate linkage
  modified_base 2: mod_base = OTHER; note = 2'-O-methyl modified nucleotide with phosphorothioate linkage
  modified_base 3: mod_base = OTHER; note = 2'-fluoro modified nucleotide
  modified_base 4: mod_base = OTHER; note = 2'-O-methyl modified nucleotide
  modified_base 5: mod_base = OTHER; note = 2'-fluoro modified nucleotide
  modified_base 6: mod_base = OTHER; note = 2'-O-methyl modified nucleotide
  modified_base 7: mod_base = OTHER; note = 2'-fluoro modified nucleotide
  modified_base 8: mod_base = OTHER; note = 2'-O-methyl modified nucleotide
  modified_base 9: mod_base = OTHER; note = 2'-fluoro modified nucleotide
  modified_base 10: mod_base = OTHER; note = 2'-O-methyl modified nucleotide
  modified_base 11: mod_base = OTHER; note = 2'-fluoro modified nucleotide
  modified_base 12: mod_base = OTHER; note = 2'-O-methyl modified nucleotide
  modified_base 13: mod_base = OTHER; note = 2'-fluoro modified nucleotide with phosphorothioate linkage
  modified_base 14: mod_base = OTHER; note = 2'-O-methyl modified nucleotide with phosphorothioate linkage
  misc_difference 15: note = 2'-fluoro modified nucleotide may be attached to trivalent N-Acetylgalactosamine
aatgaatataccata

SEQ ID NO: 930 - RNA, 15 nt, synthetic construct
  source 1..15: mol_type = other RNA
  modified_base 1: mod_base = OTHER; note = 2'-fluoro modified nucleotide with phosphorothioate linkage
  modified_base 2: mod_base = OTHER; note = 2'-O-methyl modified nucleotide with phosphorothioate linkage
  modified_base 3: mod_base = OTHER; note = 2'-fluoro modified nucleotide
  modified_base 4: mod_base = OTHER; note = 2'-O-methyl modified nucleotide
  modified_base 5: mod_base = OTHER; note = 2'-fluoro modified nucleotide
  modified_base 6: mod_base = OTHER; note = 2'-O-methyl modified nucleotide
  modified_base 7: mod_base = OTHER; note = 2'-fluoro modified nucleotide
  modified_base 8: mod_base = OTHER; note = 2'-O-methyl modified nucleotide
  modified_base 9: mod_base = OTHER; note = 2'-fluoro modified nucleotide
  modified_base 10: mod_base = OTHER; note = 2'-O-methyl modified nucleotide
  modified_base 11: mod_base = OTHER; note = 2'-fluoro modified nucleotide
  modified_base 12: mod_base = OTHER; note = 2'-O-methyl modified nucleotide
  modified_base 13: mod_base = OTHER; note = 2'-fluoro modified nucleotide with phosphorothioate linkage
  modified_base 14: mod_base = OTHER; note = 2'-O-methyl modified nucleotide with phosphorothioate linkage
  misc_difference 15: note = 2'-fluoro modified nucleotide may be attached to trivalent N-Acetylgalactosamine
aagttcatcttgtta

SEQ ID NO: 931 - RNA, 15 nt, synthetic construct
  source 1..15: mol_type = other RNA
  modified_base 1: mod_base = OTHER; note = 2'-fluoro modified nucleotide with phosphorothioate linkage
  modified_base 2: mod_base = OTHER; note = 2'-O-methyl modified nucleotide with phosphorothioate linkage
  modified_base 3: mod_base = OTHER; note = 2'-fluoro modified nucleotide
  modified_base 4: mod_base = OTHER; note = 2'-O-methyl modified nucleotide
  modified_base 5: mod_base = OTHER; note = 2'-fluoro modified nucleotide
  modified_base 6: mod_base = OTHER; note = 2'-O-methyl modified nucleotide
  modified_base 7: mod_base = OTHER; note = 2'-fluoro modified nucleotide
  modified_base 8: mod_base = OTHER; note = 2'-O-methyl modified nucleotide
  modified_base 9: mod_base = OTHER; note = 2'-fluoro modified nucleotide
  modified_base 10: mod_base = OTHER; note = 2'-O-methyl modified nucleotide
  modified_base 11: mod_base = OTHER; note = 2'-fluoro modified nucleotide
  modified_base 12: mod_base = OTHER; note = 2'-O-methyl modified nucleotide
  modified_base 13: mod_base = OTHER; note = 2'-fluoro modified nucleotide with phosphorothioate linkage
  modified_base 14: mod_base = OTHER; note = 2'-O-methyl modified nucleotide with phosphorothioate linkage
  misc_difference 15: note = 2'-fluoro modified nucleotide may be attached to trivalent N-Acetylgalactosamine
aattcctgaagttca

SEQ ID NO: 932 - RNA, 15 nt, synthetic construct
  source 1..15: mol_type = other RNA
  modified_base 1: mod_base = OTHER; note = 2'-fluoro modified nucleotide with phosphorothioate linkage
  modified_base 2: mod_base = OTHER; note = 2'-O-methyl modified nucleotide with phosphorothioate linkage
  modified_base 3: mod_base = OTHER; note = 2'-fluoro modified nucleotide
  modified_base 4: mod_base = OTHER; note = 2'-O-methyl modified nucleotide
  modified_base 5: mod_base = OTHER; note = 2'-fluoro modified nucleotide
  modified_base 6: mod_base = OTHER; note = 2'-O-methyl modified nucleotide
  modified_base 7: mod_base = OTHER; note = 2'-fluoro modified nucleotide
  modified_base 8: mod_base = OTHER; note = 2'-O-methyl modified nucleotide
  modified_base 9: mod_base = OTHER; note = 2'-fluoro modified nucleotide
  modified_base 10: mod_base = OTHER; note = 2'-O-methyl modified nucleotide
  modified_base 11: mod_base = OTHER; note = 2'-fluoro modified nucleotide
  modified_base 12: mod_base = OTHER; note = 2'-O-methyl modified nucleotide
  modified_base 13: mod_base = OTHER; note = 2'-fluoro modified nucleotide with phosphorothioate linkage
  modified_base 14: mod_base = OTHER; note = 2'-O-methyl modified nucleotide with phosphorothioate linkage
  misc_difference 15: note = 2'-fluoro modified nucleotide may be attached to trivalent N-Acetylgalactosamine
aataagagaagacta

SEQ ID NO: 933 - RNA, 15 nt, synthetic construct
  source 1..15: mol_type = other RNA
  modified_base 1: mod_base = OTHER; note = 2'-fluoro modified nucleotide with phosphorothioate linkage
  modified_base 2: mod_base = OTHER; note = 2'-O-methyl modified nucleotide with phosphorothioate linkage
  modified_base 3: mod_base = OTHER; note = 2'-fluoro modified nucleotide
  modified_base 4: mod_base = OTHER; note = 2'-O-methyl modified nucleotide
  modified_base 5: mod_base = OTHER; note = 2'-fluoro modified nucleotide
  modified_base 6: mod_base = OTHER; note = 2'-O-methyl modified nucleotide
  modified_base 7: mod_base = OTHER; note = 2'-fluoro modified nucleotide
  modified_base 8: mod_base = OTHER; note = 2'-O-methyl modified nucleotide
  modified_base 9: mod_base = OTHER; note = 2'-fluoro modified nucleotide
  modified_base 10: mod_base = OTHER; note = 2'-O-methyl modified nucleotide
  modified_base 11: mod_base = OTHER; note = 2'-fluoro modified nucleotide
  modified_base 12: mod_base = OTHER; note = 2'-O-methyl modified nucleotide
  modified_base 13: mod_base = OTHER; note = 2'-fluoro modified nucleotide with phosphorothioate linkage
  modified_base 14: mod_base = OTHER; note = 2'-O-methyl modified nucleotide with phosphorothioate linkage
  misc_difference 15: note = 2'-fluoro modified nucleotide may be attached to trivalent N-Acetylgalactosamine
aaagtataaacatta

SEQ ID NO: 934 - RNA, 15 nt, synthetic construct
  source 1..15: mol_type = other RNA
  modified_base 1: mod_base = OTHER; note = 2'-fluoro modified nucleotide with phosphorothioate linkage
  modified_base 2: mod_base = OTHER; note = 2'-O-methyl modified nucleotide with phosphorothioate linkage
  modified_base 3: mod_base = OTHER; note = 2'-fluoro modified nucleotide
  modified_base 4: mod_base = OTHER; note = 2'-O-methyl modified nucleotide
  modified_base 5: mod_base = OTHER; note = 2'-fluoro modified nucleotide
  modified_base 6: mod_base = OTHER; note = 2'-O-methyl modified nucleotide
  modified_base 7: mod_base = OTHER; note = 2'-fluoro modified nucleotide
  modified_base 8: mod_base = OTHER; note = 2'-O-methyl modified nucleotide
  modified_base 9: mod_base = OTHER; note = 2'-fluoro modified nucleotide
  modified_base 10: mod_base = OTHER; note = 2'-O-methyl modified nucleotide
  modified_base 11: mod_base = OTHER; note = 2'-fluoro modified nucleotide
  modified_base 12: mod_base = OTHER; note = 2'-O-methyl modified nucleotide
  modified_base 13: mod_base = OTHER; note = 2'-fluoro modified nucleotide with phosphorothioate linkage
  modified_base 14: mod_base = OTHER; note = 2'-O-methyl modified nucleotide with phosphorothioate linkage
  misc_difference 15: note = 2'-fluoro modified nucleotide may be attached to trivalent N-Acetylgalactosamine
tgtgtacgattccga

SEQ ID NO: 935 - RNA, 15 nt, synthetic construct
  source 1..15: mol_type = other RNA
  modified_base 1: mod_base = OTHER; note = 2'-fluoro modified nucleotide with phosphorothioate linkage
  modified_base 2: mod_base = OTHER; note = 2'-O-methyl modified nucleotide with phosphorothioate linkage
  modified_base 3: mod_base = OTHER; note = 2'-fluoro modified nucleotide
  modified_base 4: mod_base = OTHER; note = 2'-O-methyl modified nucleotide
  modified_base 5: mod_base = OTHER; note = 2'-fluoro modified nucleotide
  modified_base 6: mod_base = OTHER; note = 2'-O-methyl modified nucleotide
  modified_base 7: mod_base = OTHER; note = 2'-fluoro modified nucleotide
  modified_base 8: mod_base = OTHER; note = 2'-O-methyl modified nucleotide
  modified_base 9: mod_base = OTHER; note = 2'-fluoro modified nucleotide
  modified_base 10: mod_base = OTHER; note = 2'-O-methyl modified nucleotide
  modified_base 11: mod_base = OTHER; note = 2'-fluoro modified nucleotide
  modified_base 12: mod_base = OTHER; note = 2'-O-methyl modified nucleotide
  modified_base 13: mod_base = OTHER; note = 2'-fluoro modified nucleotide with phosphorothioate linkage
  modified_base 14: mod_base = OTHER; note = 2'-O-methyl modified nucleotide with phosphorothioate linkage
  misc_difference 15: note = 2'-fluoro modified nucleotide may be attached to trivalent N-Acetylgalactosamine
aagagcagaggtata

SEQ ID NO: 936 - RNA, 15 nt, synthetic construct
  source 1..15: mol_type = other RNA
  modified_base 1: mod_base = OTHER; note = 2'-fluoro modified nucleotide with phosphorothioate linkage
  modified_base 2: mod_base = OTHER; note = 2'-O-methyl modified nucleotide with phosphorothioate linkage
  modified_base 3: mod_base = OTHER; note = 2'-fluoro modified nucleotide
  modified_base 4: mod_base = OTHER; note = 2'-O-methyl modified nucleotide
  modified_base 5: mod_base = OTHER; note = 2'-fluoro modified nucleotide
  modified_base 6: mod_base = OTHER; note = 2'-O-methyl modified nucleotide
  modified_base 7: mod_base = OTHER; note = 2'-fluoro modified nucleotide
  modified_base 8: mod_base = OTHER; note = 2'-O-methyl modified nucleotide
  modified_base 9: mod_base = OTHER; note = 2'-fluoro modified nucleotide
  modified_base 10: mod_base = OTHER; note = 2'-O-methyl modified nucleotide
  modified_base 11: mod_base = OTHER; note = 2'-fluoro modified nucleotide
  modified_base 12: mod_base = OTHER; note = 2'-O-methyl modified nucleotide
  modified_base 13: mod_base = OTHER; note = 2'-fluoro modified nucleotide with phosphorothioate linkage
  modified_base 14: mod_base = OTHER; note = 2'-O-methyl modified nucleotide with phosphorothioate linkage
  misc_difference 15: note = 2'-fluoro modified nucleotide may be attached to trivalent N-Acetylgalactosamine
tagaagaaattgata

SEQ ID NO: 937 - RNA, 15 nt, synthetic construct
  source 1..15: mol_type = other RNA
  modified_base 1: mod_base = OTHER; note = 2'-fluoro modified nucleotide with phosphorothioate linkage
  modified_base 2: mod_base = OTHER; note = 2'-O-methyl modified nucleotide with phosphorothioate linkage
  modified_base 3: mod_base = OTHER; note = 2'-fluoro modified nucleotide
  modified_base 4: mod_base = OTHER; note = 2'-O-methyl modified nucleotide
  modified_base 5: mod_base = OTHER; note = 2'-fluoro modified nucleotide
  modified_base 6: mod_base = OTHER; note = 2'-O-methyl modified nucleotide
  modified_base 7: mod_base = OTHER; note = 2'-fluoro modified nucleotide
  modified_base 8: mod_base = OTHER; note = 2'-O-methyl modified nucleotide
  modified_base 9: mod_base = OTHER; note = 2'-fluoro modified nucleotide
  modified_base 10: mod_base = OTHER; note = 2'-O-methyl modified nucleotide
  modified_base 11: mod_base = OTHER; note = 2'-fluoro modified nucleotide
  modified_base 12: mod_base = OTHER; note = 2'-O-methyl modified nucleotide
  modified_base 13: mod_base = OTHER; note = 2'-fluoro modified nucleotide with phosphorothioate linkage
  modified_base 14: mod_base = OTHER; note = 2'-O-methyl modified nucleotide with phosphorothioate linkage
  misc_difference 15: note = 2'-fluoro modified nucleotide may be attached to trivalent N-Acetylgalactosamine
caaaacacaatgtta

SEQ ID NO: 938 - RNA, 15 nt, synthetic construct
  source 1..15: mol_type = other RNA
  modified_base 1: mod_base = OTHER; note = 2'-fluoro modified nucleotide with phosphorothioate linkage
  modified_base 2: mod_base = OTHER; note = 2'-O-methyl modified nucleotide with phosphorothioate linkage
  modified_base 3: mod_base = OTHER; note = 2'-fluoro modified nucleotide
  modified_base 4: mod_base = OTHER; note = 2'-O-methyl modified nucleotide
  modified_base 5: mod_base = OTHER; note = 2'-fluoro modified nucleotide
  modified_base 6: mod_base = OTHER; note = 2'-O-methyl modified nucleotide
  modified_base 7: mod_base = OTHER; note = 2'-fluoro modified nucleotide
  modified_base 8: mod_base = OTHER; note = 2'-O-methyl modified nucleotide
  modified_base 9: mod_base = OTHER; note = 2'-fluoro modified nucleotide
  modified_base 10: mod_base = OTHER; note = 2'-O-methyl modified nucleotide
  modified_base 11: mod_base = OTHER; note = 2'-fluoro modified nucleotide
  modified_base 12: mod_base = OTHER; note = 2'-O-methyl modified nucleotide
  modified_base 13: mod_base = OTHER; note = 2'-fluoro modified nucleotide with phosphorothioate linkage
  modified_base 14: mod_base = OTHER; note = 2'-O-methyl modified nucleotide with phosphorothioate linkage
  misc_difference 15: note = 2'-fluoro modified nucleotide may be attached to trivalent N-Acetylgalactosamine
atgcttataaagtta

SEQ ID NO: 939 - RNA, 15 nt, synthetic construct
  source 1..15: mol_type = other RNA
  modified_base 1: mod_base = OTHER; note = 2'-fluoro modified nucleotide with phosphorothioate linkage
  modified_base 2: mod_base = OTHER; note = 2'-O-methyl modified nucleotide with phosphorothioate linkage
  modified_base 3: mod_base = OTHER; note = 2'-fluoro modified nucleotide
  modified_base 4: mod_base = OTHER; note = 2'-O-methyl modified nucleotide
  modified_base 5: mod_base = OTHER; note = 2'-fluoro modified nucleotide
  modified_base 6: mod_base = OTHER; note = 2'-O-methyl modified nucleotide
  modified_base 7: mod_base = OTHER; note = 2'-fluoro modified nucleotide
  modified_base 8: mod_base = OTHER; note = 2'-O-methyl modified nucleotide
  modified_base 9: mod_base = OTHER; note = 2'-fluoro modified nucleotide
  modified_base 10: mod_base = OTHER; note = 2'-O-methyl modified nucleotide
  modified_base 11: mod_base = OTHER; note = 2'-fluoro modified nucleotide
  modified_base 12: mod_base = OTHER; note = 2'-O-methyl modified nucleotide
  modified_base 13: mod_base = OTHER; note = 2'-fluoro modified nucleotide with phosphorothioate linkage
  modified_base 14: mod_base = OTHER; note = 2'-O-methyl modified nucleotide with phosphorothioate linkage
  misc_difference 15: note = 2'-fluoro modified nucleotide may be attached to trivalent N-Acetylgalactosamine
ttaaaagttatccta

SEQ ID NO: 940 - RNA, 15 nt, synthetic construct
  source 1..15: mol_type = other RNA
  modified_base 1: mod_base = OTHER; note = 2'-fluoro modified nucleotide with phosphorothioate linkage
  modified_base 2: mod_base = OTHER; note = 2'-O-methyl modified nucleotide with phosphorothioate linkage
  modified_base 3: mod_base = OTHER; note = 2'-fluoro modified nucleotide
  modified_base 4: mod_base = OTHER; note = 2'-O-methyl modified nucleotide
  modified_base 5: mod_base = OTHER; note = 2'-fluoro modified nucleotide
  modified_base 6: mod_base = OTHER; note = 2'-O-methyl modified nucleotide
  modified_base 7: mod_base = OTHER; note = 2'-fluoro modified nucleotide
  modified_base 8: mod_base = OTHER; note = 2'-O-methyl modified nucleotide
  modified_base 9: mod_base = OTHER; note = 2'-fluoro modified nucleotide
  modified_base 10: mod_base = OTHER; note = 2'-O-methyl modified nucleotide
  modified_base 11: mod_base = OTHER; note = 2'-fluoro modified nucleotide
  modified_base 12: mod_base = OTHER; note = 2'-O-methyl modified nucleotide
  modified_base 13: mod_base = OTHER; note = 2'-fluoro modified nucleotide with phosphorothioate linkage
  modified_base 14: mod_base = OTHER; note = 2'-O-methyl modified nucleotide with phosphorothioate linkage
  misc_difference 15: note = 2'-fluoro modified nucleotide may be attached to trivalent N-Acetylgalactosamine
tatcaaccaataaaa

SEQ ID NO: 941 - RNA, 15 nt, synthetic construct
  source 1..15: mol_type = other RNA
  modified_base 1: mod_base = OTHER; note = 2'-fluoro modified nucleotide with phosphorothioate linkage
  modified_base 2: mod_base = OTHER; note = 2'-O-methyl modified nucleotide with phosphorothioate linkage
  modified_base 3: mod_base = OTHER; note = 2'-fluoro modified nucleotide
  modified_base 4: mod_base = OTHER; note = 2'-O-methyl modified nucleotide
  modified_base 5: mod_base = OTHER; note = 2'-fluoro modified nucleotide
  modified_base 6: mod_base = OTHER; note = 2'-O-methyl modified nucleotide
  modified_base 7: mod_base = OTHER; note = 2'-fluoro modified nucleotide
  modified_base 8: mod_base = OTHER; note = 2'-O-methyl modified nucleotide
  modified_base 9: mod_base = OTHER; note = 2'-fluoro modified nucleotide
  modified_base 10: mod_base = OTHER; note = 2'-O-methyl modified nucleotide
  modified_base 11: mod_base = OTHER; note = 2'-fluoro modified nucleotide
  modified_base 12: mod_base = OTHER; note = 2'-O-methyl modified nucleotide
  modified_base 13: mod_base = OTHER; note = 2'-fluoro modified nucleotide with phosphorothioate linkage
  modified_base 14: mod_base = OTHER; note = 2'-O-methyl modified nucleotide with phosphorothioate linkage
  misc_difference 15: note = 2'-fluoro modified nucleotide may be attached to trivalent N-Acetylgalactosamine
aagaaaacagttgca

SEQ ID NO: 942 - RNA, 15 nt, synthetic construct
  source 1..15: mol_type = other RNA
  modified_base 1: mod_base = OTHER; note = 2'-fluoro modified nucleotide with phosphorothioate linkage
  modified_base 2: mod_base = OTHER; note = 2'-O-methyl modified nucleotide with phosphorothioate linkage
  modified_base 3: mod_base = OTHER; note = 2'-fluoro modified nucleotide
  modified_base 4: mod_base = OTHER; note = 2'-O-methyl modified nucleotide
  modified_base 5: mod_base = OTHER; note = 2'-fluoro modified nucleotide
  modified_base 6: mod_base = OTHER; note = 2'-O-methyl modified nucleotide
  modified_base 7: mod_base = OTHER; note = 2'-fluoro modified nucleotide
  modified_base 8: mod_base = OTHER; note = 2'-O-methyl modified nucleotide
  modified_base 9: mod_base = OTHER; note = 2'-fluoro modified nucleotide
  modified_base 10: mod_base = OTHER; note = 2'-O-methyl modified nucleotide
  modified_base 11: mod_base = OTHER; note = 2'-fluoro modified nucleotide
  modified_base 12: mod_base = OTHER; note = 2'-O-methyl modified nucleotide
  modified_base 13: mod_base = OTHER; note = 2'-fluoro modified nucleotide with phosphorothioate linkage
  modified_base 14: mod_base = OTHER; note = 2'-O-methyl modified nucleotide with phosphorothioate linkage
  misc_difference 15: note = 2'-fluoro modified nucleotide may be attached to trivalent N-Acetylgalactosamine
agttgtatcaaagca

SEQ ID NO: 943 - RNA, 15 nt, synthetic construct
  source 1..15: mol_type = other RNA
  modified_base 1: mod_base = OTHER; note = 2'-fluoro modified nucleotide with phosphorothioate linkage
  modified_base 2: mod_base = OTHER; note = 2'-O-methyl modified nucleotide with phosphorothioate linkage
  modified_base 3: mod_base = OTHER; note = 2'-fluoro modified nucleotide
  modified_base 4: mod_base = OTHER; note = 2'-O-methyl modified nucleotide
  modified_base 5: mod_base = OTHER; note = 2'-fluoro modified nucleotide
  modified_base 6: mod_base = OTHER; note = 2'-O-methyl modified nucleotide
  modified_base 7: mod_base = OTHER; note = 2'-fluoro modified nucleotide
  modified_base 8: mod_base = OTHER; note = 2'-O-methyl modified nucleotide
  modified_base 9: mod_base = OTHER; note = 2'-fluoro modified nucleotide
  modified_base 10: mod_base = OTHER; note = 2'-O-methyl modified nucleotide
  modified_base 11: mod_base = OTHER; note = 2'-fluoro modified nucleotide
  modified_base 12: mod_base = OTHER; note = 2'-O-methyl modified nucleotide
  modified_base 13: mod_base = OTHER; note = 2'-fluoro modified nucleotide with phosphorothioate linkage
  modified_base 14: mod_base = OTHER; note = 2'-O-methyl modified nucleotide with phosphorothioate linkage
  misc_difference 15: note = 2'-fluoro modified nucleotide may be attached to trivalent N-Acetylgalactosamine
agagagaagctttga

SEQ ID NO: 944 - RNA, 15 nt, synthetic construct
  source 1..15: mol_type = other RNA
  modified_base 1: mod_base = OTHER; note = 2'-fluoro modified nucleotide with phosphorothioate linkage
  modified_base 2: mod_base = OTHER; note = 2'-O-methyl modified nucleotide with phosphorothioate linkage
  modified_base 3: mod_base = OTHER; note = 2'-fluoro modified nucleotide
  modified_base 4: mod_base = OTHER; note = 2'-O-methyl modified nucleotide
  modified_base 5: mod_base = OTHER; note = 2'-fluoro modified nucleotide
  modified_base 6: mod_base = OTHER; note = 2'-O-methyl modified nucleotide
  modified_base 7: mod_base = OTHER; note = 2'-fluoro modified nucleotide
  modified_base 8: mod_base = OTHER; note = 2'-O-methyl modified nucleotide
  modified_base 9: mod_base = OTHER; note = 2'-fluoro modified nucleotide
  modified_base 10: mod_base = OTHER; note = 2'-O-methyl modified nucleotide
  modified_base 11: mod_base = OTHER; note = 2'-fluoro modified nucleotide
  modified_base 12: mod_base = OTHER; note = 2'-O-methyl modified nucleotide
  modified_base 13: mod_base = OTHER; note = 2'-fluoro modified nucleotide with phosphorothioate linkage
  modified_base 14: mod_base = OTHER; note = 2'-O-methyl modified nucleotide with phosphorothioate linkage
  misc_difference 15: note = 2'-fluoro modified nucleotide may be attached to trivalent N-Acetylgalactosamine
acgaaaggagttcca

SEQ ID NO: 945 - RNA, 15 nt, synthetic construct
  source 1..15: mol_type = other RNA
  modified_base 1: mod_base = OTHER; note = 2'-fluoro modified nucleotide with phosphorothioate linkage
  modified_base 2: mod_base = OTHER; note = 2'-O-methyl modified nucleotide with phosphorothioate linkage
  modified_base 3: mod_base = OTHER; note = 2'-fluoro modified nucleotide
  modified_base 4: mod_base = OTHER; note = 2'-O-methyl modified nucleotide
  modified_base 5: mod_base = OTHER; note = 2'-fluoro modified nucleotide
  modified_base 6: mod_base = OTHER; note = 2'-O-methyl modified nucleotide
  modified_base 7: mod_base = OTHER; note = 2'-fluoro modified nucleotide
  modified_base 8: mod_base = OTHER; note = 2'-O-methyl modified nucleotide
  modified_base 9: mod_base = OTHER; note = 2'-fluoro modified nucleotide
  modified_base 10: mod_base = OTHER; note = 2'-O-methyl modified nucleotide
  modified_base 11: mod_base = OTHER; note = 2'-fluoro modified nucleotide
  modified_base 12: mod_base = OTHER; note = 2'-O-methyl modified nucleotide
  modified_base 13: mod_base = OTHER; note = 2'-fluoro modified nucleotide with phosphorothioate linkage
  modified_base 14: mod_base = OTHER; note = 2'-O-methyl modified nucleotide with phosphorothioate linkage
  misc_difference 15: note = 2'-fluoro modified nucleotide may be attached to trivalent N-Acetylgalactosamine
caaagaactgtcata

SEQ ID NO: 946 - RNA, 15 nt, synthetic construct
  source 1..15: mol_type = other RNA
  modified_base 1: mod_base = OTHER; note = 2'-fluoro modified nucleotide with phosphorothioate linkage
  modified_base 2: mod_base = OTHER; note = 2'-O-methyl modified nucleotide with phosphorothioate linkage
  modified_base 3: mod_base = OTHER; note = 2'-fluoro modified nucleotide
  modified_base 4: mod_base = OTHER; note = 2'-O-methyl modified nucleotide
  modified_base 5: mod_base = OTHER; note = 2'-fluoro modified nucleotide
  modified_base 6: mod_base = OTHER; note = 2'-O-methyl modified nucleotide
  modified_base 7: mod_base = OTHER; note = 2'-fluoro modified nucleotide
  modified_base 8: mod_base = OTHER; note = 2'-O-methyl modified nucleotide
  modified_base 9: mod_base = OTHER; note = 2'-fluoro modified nucleotide
  modified_base 10: mod_base = OTHER; note = 2'-O-methyl modified nucleotide
  modified_base 11: mod_base = OTHER; note = 2'-fluoro modified nucleotide
  modified_base 12: mod_base = OTHER; note = 2'-O-methyl modified nucleotide
  modified_base 13: mod_base = OTHER; note = 2'-fluoro modified nucleotide with phosphorothioate linkage
  modified_base 14: mod_base = OTHER; note = 2'-O-methyl modified nucleotide with phosphorothioate linkage
  misc_difference 15: note = 2'-fluoro modified nucleotide may be attached to trivalent N-Acetylgalactosamine
catgttattctgcaa

SEQ ID NO: 947 - RNA, 15 nt, synthetic construct
  source 1..15: mol_type = other RNA
  modified_base 1: mod_base = OTHER; note = 2'-fluoro modified nucleotide with phosphorothioate linkage
  modified_base 2: mod_base = OTHER; note = 2'-O-methyl modified nucleotide with phosphorothioate linkage
  modified_base 3: mod_base = OTHER; note = 2'-fluoro modified nucleotide
  modified_base 4: mod_base = OTHER; note = 2'-O-methyl modified nucleotide
  modified_base 5: mod_base = OTHER; note = 2'-fluoro modified nucleotide
  modified_base 6: mod_base = OTHER; note = 2'-O-methyl modified nucleotide
  modified_base 7: mod_base = OTHER; note = 2'-fluoro modified nucleotide
  modified_base 8: mod_base = OTHER; note = 2'-O-methyl modified nucleotide
  modified_base 9: mod_base = OTHER; note = 2'-fluoro modified nucleotide
  modified_base 10: mod_base = OTHER; note = 2'-O-methyl modified nucleotide
  modified_base 11: mod_base = OTHER; note = 2'-fluoro modified nucleotide
  modified_base 12: mod_base = OTHER; note = 2'-O-methyl modified nucleotide
  modified_base 13: mod_base = OTHER; note = 2'-fluoro modified nucleotide with phosphorothioate linkage
  modified_base 14: mod_base = OTHER; note = 2'-O-methyl modified nucleotide with phosphorothioate linkage
  misc_difference 15: note = 2'-fluoro modified nucleotide may be attached to trivalent N-Acetylgalactosamine
actataggacttcta

SEQ ID NO: 948 - RNA, 15 nt, synthetic construct
  source 1..15: mol_type = other RNA
  modified_base 1: mod_base = OTHER; note = 2'-fluoro modified nucleotide with phosphorothioate linkage
  modified_base 2: mod_base = OTHER; note = 2'-O-methyl modified nucleotide with phosphorothioate linkage
  modified_base 3: mod_base = OTHER; note = 2'-fluoro modified nucleotide
  modified_base 4: mod_base = OTHER; note = 2'-O-methyl modified nucleotide
  modified_base 5: mod_base = OTHER; note = 2'-fluoro modified nucleotide
  modified_base 6: mod_base = OTHER; note = 2'-O-methyl modified nucleotide
  modified_base 7: mod_base = OTHER; note = 2'-fluoro modified nucleotide
  modified_base 8: mod_base = OTHER; note = 2'-O-methyl modified nucleotide
  modified_base 9: mod_base = OTHER; note = 2'-fluoro modified nucleotide
  modified_base 10: mod_base = OTHER; note = 2'-O-methyl modified nucleotide
  modified_base 11: mod_base = OTHER; note = 2'-fluoro modified nucleotide
  modified_base 12: mod_base = OTHER; note = 2'-O-methyl modified nucleotide
  modified_base 13: mod_base = OTHER; note = 2'-fluoro modified nucleotide with phosphorothioate linkage
  modified_base 14: mod_base = OTHER; note = 2'-O-methyl modified nucleotide with phosphorothioate linkage
  misc_difference 15: note = 2'-fluoro modified nucleotide may be attached to trivalent N-Acetylgalactosamine
ctattaaaagttata

SEQ ID NO: 949 - RNA, 15 nt, synthetic construct
  source 1..15: mol_type = other RNA
  modified_base 1: mod_base = OTHER; note = 2'-fluoro modified nucleotide with phosphorothioate linkage
  modified_base 2: mod_base = OTHER; note = 2'-O-methyl modified nucleotide with phosphorothioate linkage
  modified_base 3: mod_base = OTHER; note = 2'-fluoro modified nucleotide
  modified_base 4: mod_base = OTHER; note = 2'-O-methyl modified nucleotide
  modified_base 5: mod_base = OTHER; note = 2'-fluoro modified nucleotide
  modified_base 6: mod_base = OTHER; note = 2'-O-methyl modified nucleotide
  modified_base 7: mod_base = OTHER; note = 2'-fluoro modified nucleotide
  modified_base 8: mod_base = OTHER; note = 2'-O-methyl modified nucleotide
  modified_base 9: mod_base = OTHER; note = 2'-fluoro modified nucleotide
  modified_base 10: mod_base = OTHER; note = 2'-O-methyl modified nucleotide
  modified_base 11: mod_base = OTHER; note = 2'-fluoro modified nucleotide
  modified_base 12: mod_base = OTHER; note = 2'-O-methyl modified nucleotide
  modified_base 13: mod_base = OTHER; note = 2'-fluoro modified nucleotide with phosphorothioate linkage
  modified_base 14: mod_base = OTHER; note = 2'-O-methyl modified nucleotide with phosphorothioate linkage
  misc_difference 15: note = 2'-fluoro modified nucleotide may be attached to trivalent N-Acetylgalactosamine
aaaagaaatcttaga

SEQ ID NO: 950 - RNA, 15 nt, synthetic construct
  source 1..15: mol_type = other RNA
  modified_base 1: mod_base = OTHER; note = 2'-fluoro modified nucleotide with phosphorothioate linkage
  modified_base 2: mod_base = OTHER; note = 2'-O-methyl modified nucleotide with phosphorothioate linkage
  modified_base 3: mod_base = OTHER; note = 2'-fluoro modified nucleotide
  modified_base 4: mod_base = OTHER; note = 2'-O-methyl modified nucleotide
  modified_base 5: mod_base = OTHER; note = 2'-fluoro modified nucleotide
  modified_base 6: mod_base = OTHER; note = 2'-O-methyl modified nucleotide
  modified_base 7: mod_base = OTHER; note = 2'-fluoro modified nucleotide
  modified_base 8: mod_base = OTHER; note = 2'-O-methyl modified nucleotide
  modified_base 9: mod_base = OTHER; note = 2'-fluoro modified nucleotide
  modified_base 10: mod_base = OTHER; note = 2'-O-methyl modified nucleotide
  modified_base 11: mod_base = OTHER; note = 2'-fluoro modified nucleotide
  modified_base 12: mod_base = OTHER; note = 2'-O-methyl modified nucleotide
  modified_base 13: mod_base = OTHER; note = 2'-fluoro modified nucleotide with phosphorothioate linkage
  modified_base 14: mod_base = OTHER; note = 2'-O-methyl modified nucleotide with phosphorothioate linkage
  misc_difference 15: note = 2'-fluoro modified nucleotide may be attached to trivalent N-Acetylgalactosamine
ccatgttcatttata

SEQ ID NO: 951 - RNA, 33 nt, synthetic construct
  source 1..33: mol_type = other RNA
  misc_difference 1: note = 2'-O-methyl modified nucleotide with phosphorothioate linkage may be modified with 5'-Phosphate
  modified_base 2: mod_base = OTHER; note = 2'-fluoro modified nucleotide with phosphorothioate linkage
  modified_base 3: mod_base = OTHER; note = 2'-O-methyl modified nucleotide
  modified_base 4: mod_base = OTHER; note = 2'-fluoro modified nucleotide
  modified_base 5: mod_base = OTHER; note = 2'-O-methyl modified nucleotide
  modified_base 6: mod_base = OTHER; note = 2'-fluoro modified nucleotide
  modified_base 7: mod_base = OTHER; note = 2'-O-methyl modified nucleotide
  modified_base 8: mod_base = OTHER; note = 2'-fluoro modified nucleotide
  modified_base 9: mod_base = OTHER; note = 2'-O-methyl modified nucleotide
  modified_base 10: mod_base = OTHER; note = 2'-fluoro modified nucleotide
  modified_base 11: mod_base = OTHER; note = 2'-O-methyl modified nucleotide
  modified_base 12: mod_base = OTHER; note = 2'-fluoro modified nucleotide
  modified_base 13: mod_base = OTHER; note = 2'-O-methyl modified nucleotide
  modified_base 14: mod_base = OTHER; note = 2'-fluoro modified nucleotide with phosphorothioate linkage
  modified_base 15: mod_base = OTHER; note = 2'-O-methyl modified nucleotide with phosphorothioate linkage
  modified_base 16: mod_base = OTHER; note = 2'-fluoro modified nucleotide with phosphorothioate linkage
  modified_base 17: mod_base = OTHER; note = 2'-O-methyl modified nucleotide with phosphorothioate linkage
  modified_base 18: mod_base = OTHER; note = 2'-fluoro modified nucleotide with phosphorothioate linkage
  modified_base 19: mod_base = OTHER; note = 2'-O-methyl modified nucleotide with phosphorothioate linkage
  modified_base 20: mod_base = OTHER; note = 2'-O-methyl modified nucleotide
  modified_base 21: mod_base = OTHER; note = 2'-fluoro modified nucleotide
  modified_base 22: mod_base = OTHER; note = 2'-O-methyl modified nucleotide
  modified_base 23: mod_base = OTHER; note = 2'-fluoro modified nucleotide
  modified_base 24: mod_base = OTHER; note = 2'-O-methyl modified nucleotide
  modified_base 25: mod_base = OTHER; note = 2'-fluoro modified nucleotide
  modified_base 26: mod_base = OTHER; note = 2'-O-methyl modified nucleotide
  modified_base 27: mod_base = OTHER; note = 2'-fluoro modified nucleotide
  modified_base 28: mod_base = OTHER; note = 2'-O-methyl modified nucleotide
  modified_base 29: mod_base = OTHER; note = 2'-fluoro modified nucleotide
  modified_base 30: mod_base = OTHER; note = 2'-O-methyl modified nucleotide
  modified_base 31: mod_base = OTHER; note = 2'-fluoro modified nucleotide with phosphorothioate linkage
  modified_base 32: mod_base = OTHER; note = 2'-O-methyl modified nucleotide with phosphorothioate linkage
  misc_difference 33: note = 2'-fluoro modified nucleotide may be attached to trivalent N-Acetylgalactosamine
tcacagtttggcctggagaaggccaaactgtga

SEQ ID NO: 952 - RNA, 33 nt, synthetic construct
  source 1..33: mol_type = other RNA
  misc_difference 1: note = 2'-O-methyl modified nucleotide with phosphorothioate linkage may be modified with 5'-Phosphate
  modified_base 2: mod_base = OTHER; note = 2'-fluoro modified nucleotide with phosphorothioate linkage
  modified_base 3: mod_base = OTHER; note = 2'-O-methyl modified nucleotide
  modified_base 4: mod_base = OTHER; note = 2'-fluoro modified nucleotide
  modified_base 5: mod_base = OTHER; note = 2'-O-methyl modified nucleotide
  modified_base 6: mod_base = OTHER; note = 2'-fluoro modified nucleotide
  modified_base 7: mod_base = OTHER; note = 2'-O-methyl modified nucleotide
  modified_base 8: mod_base = OTHER; note = 2'-fluoro modified nucleotide
  modified_base 9: mod_base = OTHER; note = 2'-O-methyl modified nucleotide
  modified_base 10: mod_base = OTHER; note = 2'-fluoro modified nucleotide
  modified_base 11: mod_base = OTHER; note = 2'-O-methyl modified nucleotide
  modified_base 12: mod_base = OTHER; note = 2'-fluoro modified nucleotide
  modified_base 13: mod_base = OTHER; note = 2'-O-methyl modified nucleotide
  modified_base 14: mod_base = OTHER; note = 2'-fluoro modified nucleotide with phosphorothioate linkage
  modified_base 15: mod_base = OTHER; note = 2'-O-methyl modified nucleotide with phosphorothioate linkage
  modified_base 16: mod_base = OTHER; note = 2'-fluoro modified nucleotide with phosphorothioate linkage
  modified_base 17: mod_base = OTHER; note = 2'-O-methyl modified nucleotide with phosphorothioate linkage
  modified_base 18: mod_base = OTHER; note = 2'-fluoro modified nucleotide with phosphorothioate linkage
  modified_base 19: mod_base = OTHER; note = 2'-O-methyl modified nucleotide with phosphorothioate linkage
  modified_base 20: mod_base = OTHER; note = 2'-O-methyl modified nucleotide
  modified_base 21: mod_base = OTHER; note = 2'-fluoro modified nucleotide
  modified_base 22: mod_base = OTHER; note = 2'-O-methyl modified nucleotide
  modified_base 23: mod_base = OTHER; note = 2'-fluoro modified nucleotide
  modified_base 24: mod_base = OTHER; note = 2'-O-methyl modified nucleotide
  modified_base 25: mod_base = OTHER; note = 2'-fluoro modified nucleotide
  modified_base 26: mod_base = OTHER; note = 2'-O-methyl modified nucleotide
  modified_base 27: mod_base = OTHER; note = 2'-fluoro modified nucleotide
  modified_base 28: mod_base = OTHER; note = 2'-O-methyl modified nucleotide
  modified_base 29: mod_base = OTHER; note = 2'-fluoro modified nucleotide
  modified_base 30: mod_base = OTHER; note = 2'-O-methyl modified nucleotide
  modified_base 31: mod_base = OTHER; note = 2'-fluoro modified nucleotide with phosphorothioate linkage
  modified_base 32: mod_base = OTHER; note = 2'-O-methyl modified nucleotide with phosphorothioate linkage
  misc_difference 33: note = 2'-fluoro modified nucleotide may be attached to trivalent N-Acetylgalactosamine
tgaatcttgaagtcaggaagacttcaagattca

SEQ ID NO: 953 - RNA, 33 nt, synthetic construct
  source 1..33: mol_type = other RNA
  misc_difference 1: note = 2'-O-methyl modified nucleotide with phosphorothioate linkage may be modified with 5'-Phosphate
  modified_base 2: mod_base = OTHER; note = 2'-fluoro modified nucleotide with phosphorothioate linkage
  modified_base 3: mod_base = OTHER; note = 2'-O-methyl modified nucleotide
  modified_base 4: mod_base = OTHER; note = 2'-fluoro modified nucleotide
  modified_base 5: mod_base = OTHER; note = 2'-O-methyl modified nucleotide
  modified_base 6: mod_base = OTHER; note = 2'-fluoro modified nucleotide
  modified_base 7: mod_base = OTHER; note = 2'-O-methyl modified nucleotide
  modified_base 8: mod_base = OTHER; note = 2'-fluoro modified nucleotide
  modified_base 9: mod_base = OTHER; note = 2'-O-methyl modified nucleotide
  modified_base 10: mod_base = OTHER; note = 2'-fluoro modified nucleotide
  modified_base 11: mod_base = OTHER; note = 2'-O-methyl modified nucleotide
  modified_base 12: mod_base = OTHER; note = 2'-fluoro modified nucleotide
  modified_base 13: mod_base = OTHER; note = 2'-O-methyl modified nucleotide
  modified_base 14: mod_base = OTHER; note = 2'-fluoro modified nucleotide with phosphorothioate linkage
  modified_base 15: mod_base = OTHER; note = 2'-O-methyl modified nucleotide with phosphorothioate linkage
  modified_base 16: mod_base = OTHER; note = 2'-fluoro modified nucleotide with phosphorothioate linkage
  modified_base 17: mod_base = OTHER; note = 2'-O-methyl modified nucleotide with phosphorothioate linkage
  modified_base 18: mod_base = OTHER; note = 2'-fluoro modified nucleotide with phosphorothioate linkage
  modified_base 19: mod_base = OTHER; note = 2'-O-methyl modified nucleotide with phosphorothioate linkage
  modified_base 20: mod_base = OTHER; note = 2'-O-methyl modified nucleotide
  modified_base 21: mod_base = OTHER; note = 2'-fluoro modified nucleotide
  modified_base 22: mod_base = OTHER; note = 2'-O-methyl modified nucleotide
  modified_base 23: mod_base = OTHER; note = 2'-fluoro modified nucleotide
  modified_base 24: mod_base = OTHER; note = 2'-O-methyl modified nucleotide
  modified_base 25: mod_base = OTHER; note = 2'-fluoro modified nucleotide
  modified_base 26: mod_base = OTHER; note = 2'-O-methyl modified nucleotide
  modified_base 27: mod_base = OTHER; note = 2'-fluoro modified nucleotide
  modified_base 28: mod_base = OTHER; note = 2'-O-methyl modified nucleotide
  modified_base 29: mod_base = OTHER; note = 2'-fluoro modified nucleotide
  modified_base 30: mod_base = OTHER; note = 2'-O-methyl modified nucleotide
  modified_base 31: mod_base = OTHER; note = 2'-fluoro modified nucleotide with phosphorothioate linkage
  modified_base 32: mod_base = OTHER; note = 2'-O-methyl modified nucleotide with phosphorothioate linkage
  misc_difference 33: note = 2'-fluoro modified nucleotide may be attached to trivalent N-Acetylgalactosamine
ttgggcttgtagctggcacagctacaagcccaa

SEQ ID NO: 954 - RNA, 33 nt, synthetic construct; identical to SEQ ID NO: 504
  source 1..33: mol_type = other RNA
  misc_difference 1: note = 2'-O-methyl modified nucleotide with phosphorothioate linkage may be modified with 5'-Phosphate
  modified_base 2: mod_base = OTHER; note = 2'-fluoro modified nucleotide with phosphorothioate linkage
  modified_base 3: mod_base = OTHER; note = 2'-O-methyl modified nucleotide
  modified_base 4: mod_base = OTHER; note = 2'-fluoro modified nucleotide
  modified_base 5: mod_base = OTHER; note = 2'-O-methyl modified nucleotide
  modified_base 6: mod_base = OTHER; note = 2'-fluoro modified nucleotide
  modified_base 7: mod_base = OTHER; note = 2'-O-methyl modified nucleotide
  modified_base 8: mod_base = OTHER; note = 2'-fluoro modified nucleotide
  modified_base 9: mod_base = OTHER; note = 2'-O-methyl modified nucleotide
  modified_base 10: mod_base = OTHER; note = 2'-fluoro modified nucleotide
  modified_base 11: mod_base = OTHER; note = 2'-O-methyl modified nucleotide
  modified_base 12: mod_base = OTHER; note = 2'-fluoro modified nucleotide
  modified_base 13: mod_base = OTHER; note = 2'-O-methyl modified nucleotide
  modified_base 14: mod_base = OTHER; note = 2'-fluoro modified nucleotide with phosphorothioate linkage
  modified_base 15: mod_base = OTHER; note = 2'-O-methyl modified nucleotide with phosphorothioate linkage
  modified_base 16: mod_base = OTHER; note = 2'-fluoro modified nucleotide with phosphorothioate linkage
  modified_base 17: mod_base = OTHER; note = 2'-O-methyl modified nucleotide with phosphorothioate linkage
  modified_base 18: mod_base = OTHER; note = 2'-fluoro modified nucleotide with phosphorothioate linkage
  modified_base 19: mod_base = OTHER; note = 2'-O-methyl modified nucleotide with phosphorothioate linkage
  modified_base 20: mod_base = OTHER; note = 2'-O-methyl modified nucleotide
  modified_base 21: mod_base = OTHER; note = 2'-fluoro modified nucleotide
  modified_base 22: mod_base = OTHER; note = 2'-O-methyl modified nucleotide
  modified_base 23: mod_base = OTHER; note = 2'-fluoro modified nucleotide
  modified_base 24: mod_base = OTHER; note = 2'-O-methyl modified nucleotide
  modified_base 25: mod_base = OTHER; note = 2'-fluoro modified nucleotide
  modified_base 26: mod_base = OTHER; note = 2'-O-methyl modified nucleotide
  modified_base 27: mod_base = OTHER; note = 2'-fluoro modified nucleotide
  modified_base 28: mod_base = OTHER; note = 2'-O-methyl modified nucleotide
  modified_base 29: mod_base = OTHER; note = 2'-fluoro modified nucleotide
  modified_base 30: mod_base = OTHER; note = 2'-O-methyl modified nucleotide
  modified_base 31: mod_base = OTHER; note = 2'-fluoro modified nucleotide with phosphorothioate linkage
  modified_base 32: mod_base = OTHER; note = 2'-O-methyl modified nucleotide with phosphorothioate linkage
  misc_difference 33: note = 2'-fluoro modified nucleotide may be attached to trivalent N-Acetylgalactosamine

SEQ ID NO: 955 - RNA, 33 nt, synthetic construct
  source 1..33: mol_type = other RNA
  misc_difference 1: note = 2'-O-methyl modified nucleotide with phosphorothioate linkage may be modified with 5'-Phosphate
  modified_base 2: mod_base = OTHER; note = 2'-fluoro modified nucleotide with phosphorothioate linkage
  modified_base 3: mod_base = OTHER; note = 2'-O-methyl modified nucleotide
  modified_base 4: mod_base = OTHER; note = 2'-fluoro modified nucleotide
  modified_base 5: mod_base = OTHER; note = 2'-O-methyl modified nucleotide
  modified_base 6: mod_base = OTHER; note = 2'-fluoro modified nucleotide
  modified_base 7: mod_base = OTHER; note = 2'-O-methyl modified nucleotide
  modified_base 8: mod_base = OTHER; note = 2'-fluoro modified nucleotide
  modified_base 9: mod_base = OTHER; note = 2'-O-methyl modified nucleotide
  modified_base 10: mod_base = OTHER; note = 2'-fluoro modified nucleotide
  modified_base 11: mod_base = OTHER; note = 2'-O-methyl modified nucleotide
  modified_base 12: mod_base = OTHER; note = 2'-fluoro modified nucleotide
  modified_base 13: mod_base = OTHER; note = 2'-O-methyl modified nucleotide
  modified_base 14: mod_base = OTHER; note = 2'-fluoro modified nucleotide with phosphorothioate linkage
  modified_base 15: mod_base = OTHER; note = 2'-O-methyl modified nucleotide with phosphorothioate linkage
  modified_base 16: mod_base = OTHER; note = 2'-fluoro modified nucleotide with phosphorothioate linkage
  modified_base 17: mod_base = OTHER; note = 2'-O-methyl modified nucleotide with phosphorothioate linkage
  modified_base 18: mod_base = OTHER; note = 2'-fluoro modified nucleotide with phosphorothioate linkage
  modified_base 19: mod_base = OTHER; note = 2'-O-methyl modified nucleotide with phosphorothioate linkage
  modified_base 20: mod_base = OTHER; note = 2'-O-methyl modified nucleotide
  modified_base 21: mod_base = OTHER; note = 2'-fluoro modified nucleotide
  modified_base 22: mod_base = OTHER; note = 2'-O-methyl modified nucleotide
  modified_base 23: mod_base = OTHER; note = 2'-fluoro modified nucleotide
  modified_base 24: mod_base = OTHER; note = 2'-O-methyl modified nucleotide
  modified_base 25: mod_base = OTHER; note = 2'-fluoro modified nucleotide
  modified_base 26: mod_base = OTHER; note = 2'-O-methyl modified nucleotide
  modified_base 27: mod_base = OTHER; note = 2'-fluoro modified nucleotide
  modified_base 28: mod_base = OTHER; note = 2'-O-methyl modified nucleotide
  modified_base 29: mod_base = OTHER; note = 2'-fluoro modified nucleotide
  modified_base 30: mod_base = OTHER; note = 2'-O-methyl modified nucleotide
  modified_base 31: mod_base = OTHER; note = 2'-fluoro modified nucleotide with phosphorothioate linkage
  modified_base 32: mod_base = OTHER; note = 2'-O-methyl modified nucleotide with phosphorothioate linkage
  misc_difference 33: note = 2'-fluoro modified nucleotide may be attached to trivalent N-Acetylgalactosamine
taacaggtttgtctgtatgagacaaacctgtta

SEQ ID NO: 956 - RNA, 33 nt, synthetic construct
  source 1..33: mol_type = other RNA
  misc_difference 1: note = 2'-O-methyl modified nucleotide with phosphorothioate linkage may be modified with 5'-Phosphate
  modified_base 2: mod_base = OTHER; note = 2'-fluoro modified nucleotide with phosphorothioate linkage
  modified_base 3: mod_base = OTHER; note = 2'-O-methyl modified nucleotide
  modified_base 4: mod_base = OTHER; note = 2'-fluoro modified nucleotide
  modified_base 5: mod_base = OTHER; note = 2'-O-methyl modified nucleotide
  modified_base 6: mod_base = OTHER; note = 2'-fluoro modified nucleotide
  modified_base 7: mod_base = OTHER; note = 2'-O-methyl modified nucleotide
  modified_base 8: mod_base = OTHER; note = 2'-fluoro modified nucleotide
  modified_base 9: mod_base = OTHER; note = 2'-O-methyl modified nucleotide
  modified_base 10: mod_base = OTHER; note = 2'-fluoro modified nucleotide
  modified_base 11: mod_base = OTHER; note = 2'-O-methyl modified nucleotide
  modified_base 12: mod_base = OTHER; note = 2'-fluoro modified nucleotide
  modified_base 13: mod_base = OTHER; note = 2'-O-methyl modified nucleotide
  modified_base 14: mod_base = OTHER; note = 2'-fluoro modified nucleotide with phosphorothioate linkage
  modified_base 15: mod_base = OTHER; note = 2'-O-methyl modified nucleotide with phosphorothioate linkage
  modified_base 16: mod_base = OTHER; note = 2'-fluoro modified nucleotide with phosphorothioate linkage
  modified_base 17: mod_base = OTHER; note = 2'-O-methyl modified nucleotide with phosphorothioate linkage
  modified_base 18: mod_base = OTHER; note = 2'-fluoro modified nucleotide with phosphorothioate linkage
  modified_base 19: mod_base = OTHER; note = 2'-O-methyl modified nucleotide with phosphorothioate linkage
  modified_base 20: mod_base = OTHER; note = 2'-O-methyl modified nucleotide
  modified_base 21: mod_base = OTHER; note = 2'-fluoro modified nucleotide
  modified_base 22: mod_base = OTHER; note = 2'-O-methyl modified nucleotide
  modified_base 23: mod_base = OTHER; note = 2'-fluoro modified nucleotide
  modified_base 24: mod_base = OTHER; note = 2'-O-methyl modified nucleotide
  modified_base 25: mod_base = OTHER; note = 2'-fluoro modified nucleotide
  modified_base 26: mod_base = OTHER; note = 2'-O-methyl modified nucleotide
  modified_base 27: mod_base = OTHER; note = 2'-fluoro modified nucleotide
  modified_base 28: mod_base = OTHER; note = 2'-O-methyl modified nucleotide
  modified_base 29: mod_base = OTHER; note = 2'-fluoro modified nucleotide
  modified_base 30: mod_base = OTHER; note = 2'-O-methyl modified nucleotide
  modified_base 31: mod_base = OTHER; note = 2'-fluoro modified nucleotide with phosphorothioate linkage
  modified_base 32: mod_base = OTHER; note = 2'-O-methyl modified nucleotide with phosphorothioate linkage
  misc_difference 33: note = 2'-fluoro modified nucleotide may be attached to trivalent N-Acetylgalactosamine
tcagacattttaacacagagttaaaatgtctga

SEQ ID NO: 957 - RNA, 33 nt, synthetic construct
  source 1..33: mol_type = other RNA
  misc_difference 1: note = 2'-O-methyl modified nucleotide with phosphorothioate linkage may be modified with 5'-Phosphate
  modified_base 2: mod_base = OTHER; note = 2'-fluoro modified nucleotide with phosphorothioate linkage
  modified_base 3: mod_base = OTHER; note = 2'-O-methyl modified nucleotide
  modified_base 4: mod_base = OTHER; note = 2'-fluoro modified nucleotide
  modified_base 5: mod_base = OTHER; note = 2'-O-methyl modified nucleotide
  modified_base 6: mod_base = OTHER; note = 2'-fluoro modified nucleotide
  modified_base 7: mod_base = OTHER; note = 2'-O-methyl modified nucleotide
  modified_base 8: mod_base = OTHER; note = 2'-fluoro modified nucleotide
  modified_base 9: mod_base = OTHER; note = 2'-O-methyl modified nucleotide
  modified_base 10: mod_base = OTHER; note = 2'-fluoro modified nucleotide
  modified_base 11: mod_base = OTHER; note = 2'-O-methyl modified nucleotide
  modified_base 12: mod_base = OTHER; note = 2'-fluoro modified nucleotide
  modified_base 13: mod_base = OTHER; note = 2'-O-methyl modified nucleotide
  modified_base 14: mod_base = OTHER; note = 2'-fluoro modified nucleotide with phosphorothioate linkage
  modified_base 15: mod_base = OTHER; note = 2'-O-methyl modified nucleotide with phosphorothioate linkage
  modified_base 16: mod_base = OTHER; note = 2'-fluoro modified nucleotide with phosphorothioate linkage
  modified_base 17: mod_base = OTHER; note = 2'-O-methyl modified nucleotide with phosphorothioate linkage
  modified_base 18: mod_base = OTHER; note = 2'-fluoro modified nucleotide with phosphorothioate linkage
  modified_base 19: mod_base = OTHER; note = 2'-O-methyl modified nucleotide with phosphorothioate linkage
  modified_base 20: mod_base = OTHER; note = 2'-O-methyl modified nucleotide
  modified_base 21: mod_base = OTHER; note = 2'-fluoro modified nucleotide
  modified_base 22: mod_base = OTHER; note = 2'-O-methyl modified nucleotide
  modified_base 23: mod_base = OTHER; note = 2'-fluoro modified nucleotide
  modified_base 24: mod_base = OTHER; note = 2'-O-methyl modified nucleotide
  modified_base 25: mod_base = OTHER; note = 2'-fluoro modified nucleotide
  modified_base 26: mod_base = OTHER; note = 2'-O-methyl modified nucleotide
  modified_base 27: mod_base = OTHER; note = 2'-fluoro modified nucleotide
  modified_base 28: mod_base = OTHER; note = 2'-O-methyl modified nucleotide
  modified_base 29: mod_base = OTHER; note = 2'-fluoro modified nucleotide
  modified_base 30: mod_base = OTHER; note = 2'-O-methyl modified nucleotide
  modified_base 31: mod_base = OTHER; note = 2'-fluoro modified nucleotide with phosphorothioate linkage
  modified_base 32: mod_base = OTHER; note = 2'-O-methyl modified nucleotide with phosphorothioate linkage
  misc_difference 33: note = 2'-fluoro modified nucleotide may be attached to trivalent N-Acetylgalactosamine
tcctggagctggttgccacaaccagctccagga

SEQ ID NO: 958 - RNA, 33 nt, synthetic construct
  source 1..33: mol_type = other RNA
  misc_difference 1: note = 2'-O-methyl modified nucleotide with phosphorothioate linkage may be modified with 5'-Phosphate
  modified_base 2: mod_base = OTHER; note = 2'-fluoro modified nucleotide with phosphorothioate linkage
  modified_base 3: mod_base = OTHER; note = 2'-O-methyl modified nucleotide
  modified_base 4: mod_base = OTHER; note = 2'-fluoro modified nucleotide
  modified_base 5: mod_base = OTHER; note = 2'-O-methyl modified nucleotide
  modified_base 6: mod_base = OTHER; note = 2'-fluoro modified nucleotide
  modified_base 7: mod_base = OTHER; note = 2'-O-methyl modified nucleotide
  modified_base 8: mod_base = OTHER; note = 2'-fluoro modified nucleotide
  modified_base 9: mod_base = OTHER; note = 2'-O-methyl modified nucleotide
  modified_base 10: mod_base = OTHER; note = 2'-fluoro modified nucleotide
  modified_base 11: mod_base = OTHER; note = 2'-O-methyl modified nucleotide
  modified_base 12: mod_base = OTHER; note = 2'-fluoro modified nucleotide
  modified_base 13: mod_base = OTHER; note = 2'-O-methyl modified nucleotide
  modified_base 14: mod_base = OTHER; note = 2'-fluoro modified nucleotide with phosphorothioate linkage
  modified_base 15: mod_base = OTHER; note = 2'-O-methyl modified nucleotide with phosphorothioate linkage
  modified_base 16: mod_base = OTHER; note = 2'-fluoro modified nucleotide with phosphorothioate linkage
  modified_base 17: mod_base = OTHER; note = 2'-O-methyl modified nucleotide with phosphorothioate linkage
  modified_base 18: mod_base = OTHER; note = 2'-fluoro modified nucleotide with phosphorothioate linkage
  modified_base 19: mod_base = OTHER; note = 2'-O-methyl modified nucleotide with phosphorothioate linkage
  modified_base 20: mod_base = OTHER; note = 2'-O-methyl modified nucleotide
  modified_base 21: mod_base = OTHER; note = 2'-fluoro modified nucleotide
  modified_base 22: mod_base = OTHER; note = 2'-O-methyl modified nucleotide
  modified_base 23: mod_base = OTHER; note = 2'-fluoro modified nucleotide
  modified_base 24: mod_base = OTHER; note = 2'-O-methyl modified nucleotide
  modified_base 25: mod_base = OTHER; note = 2'-fluoro modified nucleotide
  modified_base 26: mod_base = OTHER; note = 2'-O-methyl modified nucleotide
  modified_base 27: mod_base = OTHER; note = 2'-fluoro modified nucleotide
  modified_base 28: mod_base = OTHER; note = 2'-O-methyl modified nucleotide
  modified_base 29: mod_base = OTHER; note = 2'-fluoro modified nucleotide
  modified_base 30: mod_base = OTHER; note = 2'-O-methyl modified nucleotide
  modified_base 31: mod_base = OTHER; note = 2'-fluoro modified nucleotide with phosphorothioate linkage
  modified_base 32: mod_base = OTHER; note = 2'-O-methyl modified nucleotide with phosphorothioate linkage
  misc_difference 33: note = 2'-fluoro modified nucleotide may be attached to trivalent N-Acetylgalactosamine
tataaaatcaagtaattattacttgattttata

SEQ ID NO: 959 - RNA, 33 nt, synthetic construct
  source 1..33: mol_type = other RNA
  misc_difference 1: note = 2'-O-methyl modified nucleotide with phosphorothioate linkage may be modified with 5'-Phosphate
  modified_base 2: mod_base = OTHER; note = 2'-fluoro modified nucleotide with phosphorothioate linkage
  modified_base 3: mod_base = OTHER; note = 2'-O-methyl modified nucleotide
  modified_base 4: mod_base = OTHER; note = 2'-fluoro modified nucleotide
  modified_base 5: mod_base = OTHER; note = 2'-O-methyl modified nucleotide
  modified_base 6: mod_base = OTHER; note = 2'-fluoro modified nucleotide
  modified_base 7: mod_base = OTHER; note = 2'-O-methyl modified nucleotide
  modified_base 8: mod_base = OTHER; note = 2'-fluoro modified nucleotide
  modified_base 9: mod_base = OTHER; note = 2'-O-methyl modified nucleotide
  modified_base 10: mod_base = OTHER; note = 2'-fluoro modified nucleotide
  modified_base 11: mod_base = OTHER; note = 2'-O-methyl modified nucleotide
  modified_base 12: mod_base = OTHER; note = 2'-fluoro modified nucleotide
  modified_base 13: mod_base = OTHER; note = 2'-O-methyl modified nucleotide
  modified_base 14: mod_base = OTHER; note = 2'-fluoro modified nucleotide with phosphorothioate linkage
  modified_base 15: mod_base = OTHER; note = 2'-O-methyl modified nucleotide with phosphorothioate linkage
  modified_base 16: mod_base = OTHER; note = 2'-fluoro modified nucleotide with phosphorothioate linkage
  modified_base 17: mod_base = OTHER; note = 2'-O-methyl modified nucleotide with phosphorothioate linkage
  modified_base 18: mod_base = OTHER; note = 2'-fluoro modified nucleotide with phosphorothioate linkage
  modified_base 19: mod_base = OTHER; note = 2'-O-methyl modified nucleotide with phosphorothioate linkage
  modified_base 20: mod_base = OTHER; note = 2'-O-methyl modified nucleotide
  modified_base 21: mod_base = OTHER; note = 2'-fluoro modified nucleotide
  modified_base 22: mod_base = OTHER; note = 2'-O-methyl modified nucleotide
  modified_base 23: mod_base = OTHER; note = 2'-fluoro modified nucleotide
  modified_base 24: mod_base = OTHER; note = 2'-O-methyl modified nucleotide
  modified_base 25: mod_base = OTHER; note = 2'-fluoro modified nucleotide
  modified_base 26: mod_base = OTHER; note = 2'-O-methyl modified nucleotide
  modified_base 27: mod_base = OTHER; note = 2'-fluoro modified nucleotide
  modified_base 28: mod_base = OTHER; note = 2'-O-methyl modified nucleotide
  modified_base 29: mod_base = OTHER; note = 2'-fluoro modified nucleotide
  modified_base 30: mod_base = OTHER; note = 2'-O-methyl modified nucleotide
  modified_base 31: mod_base = OTHER; note = 2'-fluoro modified nucleotide with phosphorothioate linkage
  modified_base 32: mod_base = OTHER; note = 2'-O-methyl modified nucleotide with phosphorothioate linkage
  misc_difference 33: note = 2'-fluoro modified nucleotide may be attached to trivalent N-Acetylgalactosamine
tacacagtttggcctggagggccaaactgtgta

SEQ ID NO: 960 - RNA, 33 nt, synthetic construct
  source 1..33: mol_type = other RNA
  misc_difference 1: note = 2'-O-methyl modified nucleotide with phosphorothioate linkage may be modified with 5'-Phosphate
  modified_base 2: mod_base = OTHER; note = 2'-fluoro modified nucleotide with phosphorothioate linkage
  modified_base 3: mod_base = OTHER; note = 2'-O-methyl modified nucleotide
  modified_base 4: mod_base = OTHER; note = 2'-fluoro modified nucleotide
  modified_base 5: mod_base = OTHER; note = 2'-O-methyl modified nucleotide
  modified_base 6: mod_base = OTHER; note = 2'-fluoro modified nucleotide
  modified_base 7: mod_base = OTHER; note = 2'-O-methyl modified nucleotide
  modified_base 8: mod_base = OTHER; note = 2'-fluoro modified nucleotide
  modified_base 9: mod_base = OTHER; note = 2'-O-methyl modified nucleotide
  modified_base 10: mod_base = OTHER; note = 2'-fluoro modified nucleotide
  modified_base 11: mod_base = OTHER; note = 2'-O-methyl modified nucleotide
  modified_base 12: mod_base = OTHER; note = 2'-fluoro modified nucleotide
  modified_base 13: mod_base = OTHER; note = 2'-O-methyl modified nucleotide
  modified_base 14: mod_base = OTHER; note = 2'-fluoro modified nucleotide with phosphorothioate linkage
  modified_base 15: mod_base = OTHER; note = 2'-O-methyl modified nucleotide with phosphorothioate linkage
  modified_base 16: mod_base = OTHER; note = 2'-fluoro modified nucleotide with phosphorothioate linkage
  modified_base 17: mod_base = OTHER; note = 2'-O-methyl modified nucleotide with phosphorothioate linkage
  modified_base 18: mod_base = OTHER; note = 2'-fluoro modified nucleotide with phosphorothioate linkage
  modified_base 19: mod_base = OTHER; note = 2'-O-methyl modified nucleotide with phosphorothioate linkage
  modified_base 20: mod_base = OTHER; note = 2'-O-methyl modified nucleotide
  modified_base 21: mod_base = OTHER; note = 2'-fluoro modified nucleotide
  modified_base 22: mod_base = OTHER; note = 2'-O-methyl modified nucleotide
  modified_base 23: mod_base = OTHER; note = 2'-fluoro modified nucleotide
  modified_base 24: mod_base = OTHER; note = 2'-O-methyl modified nucleotide
  modified_base 25: mod_base = OTHER; note = 2'-fluoro modified nucleotide
  modified_base 26: mod_base = OTHER; note = 2'-O-methyl modified nucleotide
  modified_base 27: mod_base = OTHER; note = 2'-fluoro modified nucleotide
  modified_base 28: mod_base = OTHER; note = 2'-O-methyl modified nucleotide
  modified_base 29: mod_base = OTHER; note = 2'-fluoro modified nucleotide
  modified_base 30: mod_base = OTHER; note = 2'-O-methyl modified nucleotide
  modified_base 31: mod_base = OTHER; note = 2'-fluoro modified nucleotide with phosphorothioate linkage
  modified_base 32: mod_base = OTHER; note = 2'-O-methyl modified nucleotide with phosphorothioate linkage
  misc_difference 33: note = 2'-fluoro modified nucleotide may be attached to trivalent N-Acetylgalactosamine
tggaatcttgaagtcaggaacttcaagattcca

SEQ ID NO: 961 - RNA, 33 nt, synthetic construct
  source 1..33: mol_type = other RNA
  misc_difference 1: note = 2'-O-methyl modified nucleotide with phosphorothioate linkage may be modified with 5'-Phosphate
  modified_base 2: mod_base = OTHER; note = 2'-fluoro modified nucleotide with phosphorothioate linkage
  modified_base 3: mod_base = OTHER; note = 2'-O-methyl modified nucleotide
  modified_base 4: mod_base = OTHER; note = 2'-fluoro modified nucleotide
  modified_base 5: mod_base = OTHER; note = 2'-O-methyl modified nucleotide
  modified_base 6: mod_base = OTHER; note = 2'-fluoro modified nucleotide
  modified_base 7: mod_base = OTHER; note = 2'-O-methyl modified nucleotide
  modified_base 8: mod_base = OTHER; note = 2'-fluoro modified nucleotide
  modified_base 9: mod_base = OTHER; note = 2'-O-methyl modified nucleotide
  modified_base 10: mod_base = OTHER; note = 2'-fluoro modified nucleotide
  modified_base 11: mod_base = OTHER; note = 2'-O-methyl modified nucleotide
  modified_base 12: mod_base = OTHER; note = 2'-fluoro modified nucleotide
  modified_base 13: mod_base = OTHER; note = 2'-O-methyl modified nucleotide
  modified_base 14: mod_base = OTHER; note = 2'-fluoro modified nucleotide with phosphorothioate linkage
  modified_base 15: mod_base = OTHER; note = 2'-O-methyl modified nucleotide with phosphorothioate linkage
  modified_base 16: mod_base = OTHER; note = 2'-fluoro modified nucleotide with phosphorothioate linkage
  modified_base 17: mod_base = OTHER; note = 2'-O-methyl modified nucleotide with phosphorothioate linkage
  modified_base 18: mod_base = OTHER; note = 2'-fluoro modified nucleotide with phosphorothioate linkage
  modified_base 19: mod_base = OTHER; note = 2'-O-methyl modified nucleotide with phosphorothioate linkage
  modified_base 20: mod_base = OTHER; note = 2'-O-methyl modified nucleotide
  modified_base 21: mod_base = OTHER; note = 2'-fluoro modified nucleotide
  modified_base 22: mod_base = OTHER; note = 2'-O-methyl modified nucleotide
  modified_base 23: mod_base = OTHER; note = 2'-fluoro modified nucleotide
  modified_base 24: mod_base = OTHER; note = 2'-O-methyl modified nucleotide
  modified_base 25: mod_base = OTHER; note = 2'-fluoro modified nucleotide
  modified_base 26: mod_base = OTHER; note = 2'-O-methyl modified nucleotide
  modified_base 27: mod_base = OTHER; note = 2'-fluoro modified nucleotide
  modified_base 28: mod_base = OTHER; note = 2'-O-methyl modified nucleotide
  modified_base 29: mod_base = OTHER; note = 2'-fluoro modified nucleotide
  modified_base 30: mod_base = OTHER; note = 2'-O-methyl modified nucleotide
  modified_base 31: mod_base = OTHER; note = 2'-fluoro modified nucleotide with phosphorothioate linkage
  modified_base 32: mod_base = OTHER; note = 2'-O-methyl modified nucleotide with phosphorothioate linkage
  misc_difference 33: note = 2'-fluoro modified nucleotide may be attached to trivalent N-Acetylgalactosamine
tgacattttaacacagaacgtgttaaaatgtca

SEQ ID NO: 962 - RNA, 33 nt, synthetic construct; identical to SEQ ID NO: 512
  source 1..33: mol_type = other RNA
  misc_difference 1: note = 2'-O-methyl modified nucleotide with phosphorothioate linkage may be modified with 5'-Phosphate
  modified_base 2: mod_base = OTHER; note = 2'-fluoro modified nucleotide with phosphorothioate linkage
  modified_base 3: mod_base = OTHER; note = 2'-O-methyl modified nucleotide
  modified_base 4: mod_base = OTHER; note = 2'-fluoro modified nucleotide
  modified_base 5: mod_base = OTHER; note = 2'-O-methyl modified nucleotide
  modified_base 6: mod_base = OTHER; note = 2'-fluoro modified nucleotide
  modified_base 7: mod_base = OTHER; note = 2'-O-methyl modified nucleotide
  modified_base 8: mod_base = OTHER; note = 2'-fluoro modified nucleotide
  modified_base 9: mod_base = OTHER; note = 2'-O-methyl modified nucleotide
  modified_base 10: mod_base = OTHER; note = 2'-fluoro modified nucleotide
  modified_base 11: mod_base = OTHER; note = 2'-O-methyl modified nucleotide
  modified_base 12: mod_base = OTHER; note = 2'-fluoro modified nucleotide
  modified_base 13: mod_base = OTHER; note = 2'-O-methyl modified nucleotide
  modified_base 14: mod_base = OTHER; note = 2'-fluoro modified nucleotide with phosphorothioate linkage
  modified_base 15: mod_base = OTHER; note = 2'-O-methyl modified nucleotide with phosphorothioate linkage
  modified_base 16: mod_base = OTHER; note = 2'-fluoro modified nucleotide with phosphorothioate linkage
  modified_base 17: mod_base = OTHER; note = 2'-O-methyl modified nucleotide with phosphorothioate linkage
  modified_base 18: mod_base = OTHER; note = 2'-fluoro modified nucleotide with phosphorothioate linkage
  modified_base 19: mod_base = OTHER; note = 2'-O-methyl modified nucleotide with phosphorothioate linkage
  modified_base 20: mod_base = OTHER; note = 2'-O-methyl modified nucleotide
  modified_base 21: mod_base = OTHER; note = 2'-fluoro modified nucleotide
  modified_base 22: mod_base = OTHER; note = 2'-O-methyl modified nucleotide
  modified_base 23: mod_base = OTHER; note = 2'-fluoro modified nucleotide
  modified_base 24: mod_base = OTHER; note = 2'-O-methyl modified nucleotide
  modified_base 25: mod_base = OTHER; note = 2'-fluoro modified nucleotide
  modified_base 26: mod_base = OTHER; note = 2'-O-methyl modified nucleotide
  modified_base 27: mod_base = OTHER; note = 2'-fluoro modified nucleotide
  modified_base 28: mod_base = OTHER; note = 2'-O-methyl modified nucleotide
  modified_base 29: mod_base = OTHER; note = 2'-fluoro modified nucleotide
  modified_base 30: mod_base = OTHER; note = 2'-O-methyl modified nucleotide
  modified_base 31: mod_base = OTHER; note = 2'-fluoro modified nucleotide with phosphorothioate linkage
  modified_base 32: mod_base = OTHER; note = 2'-O-methyl modified nucleotide with phosphorothioate linkage
  misc_difference 33: note = 2'-fluoro modified nucleotide may be attached to trivalent N-Acetylgalactosamine

SEQ ID NO: 963 - RNA, 33 nt, synthetic construct
  source 1..33: mol_type = other RNA
  misc_difference 1: note = 2'-O-methyl modified nucleotide with phosphorothioate linkage may be modified with 5'-Phosphate
  modified_base 2: mod_base = OTHER; note = 2'-fluoro modified nucleotide with phosphorothioate linkage
  modified_base 3: mod_base = OTHER; note = 2'-O-methyl modified nucleotide
  modified_base 4: mod_base = OTHER; note = 2'-fluoro modified nucleotide
  modified_base 5: mod_base = OTHER; note = 2'-O-methyl modified nucleotide
  modified_base 6: mod_base = OTHER; note = 2'-fluoro modified nucleotide
  modified_base 7: mod_base = OTHER; note = 2'-O-methyl modified nucleotide
  modified_base 8: mod_base = OTHER; note = 2'-fluoro modified nucleotide
  modified_base 9: mod_base = OTHER; note = 2'-O-methyl modified nucleotide
  modified_base 10: mod_base = OTHER; note = 2'-fluoro modified nucleotide
  modified_base 11: mod_base = OTHER; note = 2'-O-methyl modified nucleotide
  modified_base 12: mod_base = OTHER; note = 2'-fluoro modified nucleotide
  modified_base 13: mod_base = OTHER; note = 2'-O-methyl modified nucleotide
  modified_base 14: mod_base = OTHER; note = 2'-fluoro modified nucleotide with phosphorothioate linkage
  modified_base 15: mod_base = OTHER; note = 2'-O-methyl modified nucleotide with phosphorothioate linkage
  modified_base 16: mod_base = OTHER; note = 2'-fluoro modified nucleotide with phosphorothioate linkage
  modified_base 17: mod_base = OTHER; note = 2'-O-methyl modified nucleotide with phosphorothioate linkage
  modified_base 18: mod_base = OTHER; note = 2'-fluoro modified nucleotide with phosphorothioate linkage
  modified_base 19: mod_base = OTHER; note = 2'-O-methyl modified nucleotide with phosphorothioate linkage
  modified_base 20: mod_base = OTHER; note = 2'-O-methyl modified nucleotide
  modified_base 21: mod_base = OTHER; note = 2'-fluoro modified nucleotide
  modified_base 22: mod_base = OTHER; note = 2'-O-methyl modified nucleotide
  modified_base 23: mod_base = OTHER; note = 2'-fluoro modified nucleotide
  modified_base 24: mod_base = OTHER; note = 2'-O-methyl modified nucleotide
  modified_base 25: mod_base = OTHER; note = 2'-fluoro modified nucleotide
  modified_base 26: mod_base = OTHER; note = 2'-O-methyl modified nucleotide
  modified_base 27: mod_base = OTHER; note = 2'-fluoro modified nucleotide
  modified_base 28: mod_base = OTHER; note = 2'-O-methyl modified nucleotide
  modified_base 29: mod_base = OTHER; note = 2'-fluoro modified nucleotide
  modified_base 30: mod_base = OTHER; note = 2'-O-methyl modified nucleotide
  modified_base 31: mod_base = OTHER; note = 2'-fluoro modified nucleotide with phosphorothioate linkage
  modified_base 32: mod_base = OTHER; note = 2'-O-methyl modified nucleotide with phosphorothioate linkage
  misc_difference 33: note = 2'-fluoro modified nucleotide may be attached to trivalent N-Acetylgalactosamine
tacagtttggcctggagaacaggccaaactgta

SEQ ID NO: 964 - RNA, 33 nt, synthetic construct
  source 1..33: mol_type = other RNA
  misc_difference 1: note = 2'-O-methyl modified nucleotide with phosphorothioate linkage may be modified with 5'-Phosphate
  modified_base 2: mod_base = OTHER; note = 2'-fluoro modified nucleotide with phosphorothioate linkage
  modified_base 3: mod_base = OTHER; note = 2'-O-methyl modified nucleotide
  modified_base 4: mod_base = OTHER; note = 2'-fluoro modified nucleotide
  modified_base 5: mod_base = OTHER; note = 2'-O-methyl modified nucleotide
  modified_base 6: mod_base = OTHER; note = 2'-fluoro modified nucleotide
  modified_base 7: mod_base = OTHER; note = 2'-O-methyl modified nucleotide
  modified_base 8: mod_base = OTHER; note = 2'-fluoro modified nucleotide
  modified_base 9: mod_base = OTHER; note = 2'-O-methyl modified nucleotide
  modified_base 10: mod_base = OTHER; note = 2'-fluoro modified nucleotide
  modified_base 11: mod_base = OTHER; note = 2'-O-methyl modified nucleotide
  modified_base 12: mod_base = OTHER; note = 2'-fluoro modified nucleotide
  modified_base 13: mod_base = OTHER; note = 2'-O-methyl modified nucleotide
  modified_base 14: mod_base = OTHER; note = 2'-fluoro modified nucleotide with phosphorothioate linkage
  modified_base 15: mod_base = OTHER; note = 2'-O-methyl modified nucleotide with phosphorothioate linkage
  modified_base 16: mod_base = OTHER; note = 2'-fluoro modified nucleotide with phosphorothioate linkage
  modified_base 17: mod_base = OTHER; note = 2'-O-methyl modified nucleotide with phosphorothioate linkage
  modified_base 18: mod_base = OTHER; note = 2'-fluoro modified nucleotide with phosphorothioate linkage
  modified_base 19: mod_base = OTHER; note = 2'-O-methyl modified nucleotide with phosphorothioate linkage
  modified_base 20: mod_base = OTHER; note = 2'-O-methyl modified nucleotide
  modified_base 21: mod_base = OTHER; note = 2'-fluoro modified nucleotide
  modified_base 22: mod_base = OTHER; note = 2'-O-methyl modified nucleotide
  modified_base 23: mod_base = OTHER; note = 2'-fluoro modified nucleotide
  modified_base 24: mod_base = OTHER; note = 2'-O-methyl modified nucleotide
  modified_base 25: mod_base = OTHER; note = 2'-fluoro modified nucleotide
  modified_base 26: mod_base = OTHER; note = 2'-O-methyl modified nucleotide
  modified_base 27: mod_base = OTHER; note = 2'-fluoro modified nucleotide
  modified_base 28: mod_base = OTHER; note = 2'-O-methyl modified nucleotide
  modified_base 29: mod_base = OTHER; note = 2'-fluoro modified nucleotide
  modified_base 30: mod_base = OTHER; note = 2'-O-methyl modified nucleotide
  modified_base 31: mod_base = OTHER; note = 2'-fluoro modified nucleotide with phosphorothioate linkage
  modified_base 32: mod_base = OTHER; note = 2'-O-methyl modified nucleotide with phosphorothioate linkage
  misc_difference 33: note = 2'-fluoro modified nucleotide may be attached to trivalent N-Acetylgalactosamine
tattatagtgagttattttaactcactataata

SEQ ID NO: 965 - RNA, 33 nt, synthetic construct; identical to SEQ ID NO: 515
  source 1..33: mol_type = other RNA
  misc_difference 1: note = 2'-O-methyl modified nucleotide with phosphorothioate linkage may be modified with 5'-Phosphate
  modified_base 2: mod_base = OTHER; note = 2'-fluoro modified nucleotide with phosphorothioate linkage
  modified_base 3: mod_base = OTHER; note = 2'-O-methyl modified nucleotide
  modified_base 4: mod_base = OTHER; note = 2'-fluoro modified nucleotide
  modified_base 5: mod_base = OTHER; note = 2'-O-methyl modified nucleotide
  modified_base 6: mod_base = OTHER; note = 2'-fluoro modified nucleotide
  modified_base 7: mod_base = OTHER; note = 2'-O-methyl modified nucleotide
  modified_base 8: mod_base = OTHER; note = 2'-fluoro modified nucleotide
  modified_base 9: mod_base = OTHER; note = 2'-O-methyl modified nucleotide
  modified_base 10: mod_base = OTHER; note = 2'-fluoro modified nucleotide
  modified_base 11: mod_base = OTHER; note = 2'-O-methyl modified nucleotide
  modified_base 12: mod_base = OTHER; note = 2'-fluoro modified nucleotide
  modified_base 13: mod_base = OTHER; note = 2'-O-methyl modified nucleotide
  modified_base 14: mod_base = OTHER; note = 2'-fluoro modified nucleotide with phosphorothioate linkage
  modified_base 15: mod_base = OTHER; note = 2'-O-methyl modified nucleotide with phosphorothioate linkage
  modified_base 16: mod_base = OTHER; note = 2'-fluoro modified nucleotide with phosphorothioate linkage
  modified_base 17: mod_base = OTHER; note = 2'-O-methyl modified nucleotide with phosphorothioate linkage
  modified_base 18: mod_base = OTHER; note = 2'-fluoro modified nucleotide with phosphorothioate linkage
  modified_base 19: mod_base = OTHER; note = 2'-O-methyl modified nucleotide with phosphorothioate linkage
  modified_base 20: mod_base = OTHER; note = 2'-O-methyl modified nucleotide
  modified_base 21: mod_base = OTHER; note = 2'-fluoro modified nucleotide
  modified_base 22: mod_base = OTHER; note = 2'-O-methyl modified nucleotide
  modified_base 23: mod_base = OTHER; note = 2'-fluoro modified nucleotide
  modified_base 24: mod_base = OTHER; note = 2'-O-methyl modified nucleotide
  modified_base 25: mod_base = OTHER; note = 2'-fluoro modified nucleotide
  modified_base 26: mod_base = OTHER; note = 2'-O-methyl modified nucleotide
  modified_base 27: mod_base = OTHER; note = 2'-fluoro modified nucleotide
  modified_base 28: mod_base = OTHER; note = 2'-O-methyl modified nucleotide
  modified_base 29: mod_base = OTHER; note = 2'-fluoro modified nucleotide
  modified_base 30: mod_base = OTHER; note = 2'-O-methyl modified nucleotide
  modified_base 31: mod_base = OTHER; note = 2'-fluoro modified nucleotide with phosphorothioate linkage
  modified_base 32: mod_base = OTHER; note = 2'-O-methyl modified nucleotide with phosphorothioate linkage
  misc_difference 33: note = 2'-fluoro modified nucleotide may be attached to trivalent N-Acetylgalactosamine

SEQ ID NO: 966 - RNA, 33 nt, synthetic construct; identical to SEQ ID NO: 516
  source 1..33: mol_type = other RNA
  misc_difference 1: note = 2'-O-methyl modified nucleotide with phosphorothioate linkage may be modified with 5'-Phosphate
  modified_base 2: mod_base = OTHER; note = 2'-fluoro modified nucleotide with phosphorothioate linkage
  modified_base 3: mod_base = OTHER; note = 2'-O-methyl modified nucleotide
  modified_base 4: mod_base = OTHER; note = 2'-fluoro modified nucleotide
  modified_base 5: mod_base = OTHER; note = 2'-O-methyl modified nucleotide
  modified_base 6: mod_base = OTHER; note = 2'-fluoro modified nucleotide
  modified_base 7: mod_base = OTHER; note = 2'-O-methyl modified nucleotide
  modified_base 8: mod_base = OTHER; note = 2'-fluoro modified nucleotide
  modified_base 9: mod_base = OTHER; note = 2'-O-methyl modified nucleotide
  modified_base 10: mod_base = OTHER; note = 2'-fluoro modified nucleotide
  modified_base 11: mod_base = OTHER; note = 2'-O-methyl modified nucleotide
  modified_base 12: mod_base = OTHER; note = 2'-fluoro modified nucleotide
  modified_base 13: mod_base = OTHER; note = 2'-O-methyl modified nucleotide
  modified_base 14: mod_base = OTHER; note = 2'-fluoro modified nucleotide with phosphorothioate linkage
  modified_base 15: mod_base = OTHER; note = 2'-O-methyl modified nucleotide with phosphorothioate linkage
  modified_base 16: mod_base = OTHER; note = 2'-fluoro modified nucleotide with phosphorothioate linkage
  modified_base 17: mod_base = OTHER; note = 2'-O-methyl modified nucleotide with phosphorothioate linkage
  modified_base 18: mod_base = OTHER; note = 2'-fluoro modified nucleotide with phosphorothioate linkage
  modified_base 19: mod_base = OTHER; note = 2'-O-methyl modified nucleotide with phosphorothioate linkage
  modified_base 20: mod_base = OTHER; note = 2'-O-methyl modified nucleotide
  modified_base 21: mod_base = OTHER; note = 2'-fluoro modified nucleotide
  modified_base 22: mod_base = OTHER; note = 2'-O-methyl modified nucleotide
  modified_base 23: mod_base = OTHER; note = 2'-fluoro modified nucleotide
  modified_base 24: mod_base = OTHER; note = 2'-O-methyl modified nucleotide
  modified_base 25: mod_base = OTHER; note = 2'-fluoro modified nucleotide
  modified_base 26: mod_base = OTHER; note = 2'-O-methyl modified nucleotide
  modified_base 27: mod_base = OTHER; note = 2'-fluoro modified nucleotide
  modified_base 28: mod_base = OTHER; note = 2'-O-methyl modified nucleotide
  modified_base 29: mod_base = OTHER; note = 2'-fluoro modified nucleotide
  modified_base 30: mod_base = OTHER; note = 2'-O-methyl modified nucleotide
  modified_base 31: mod_base = OTHER; note = 2'-fluoro modified nucleotide with phosphorothioate linkage
  modified_base 32: mod_base = OTHER; note = 2'-O-methyl modified nucleotide with phosphorothioate linkage
  misc_difference 33: note = 2'-fluoro modified nucleotide may be attached to trivalent N-Acetylgalactosamine

SEQ ID NO: 967 - RNA, 33 nt, synthetic construct
  source 1..33: mol_type = other RNA
  misc_difference 1: note = 2'-O-methyl modified nucleotide with phosphorothioate linkage may be modified with 5'-Phosphate
  modified_base 2: mod_base = OTHER; note = 2'-fluoro modified nucleotide with phosphorothioate linkage
  modified_base 3: mod_base = OTHER; note = 2'-O-methyl modified nucleotide
  modified_base 4: mod_base = OTHER; note = 2'-fluoro modified nucleotide
  modified_base 5: mod_base = OTHER; note = 2'-O-methyl modified nucleotide
  modified_base 6: mod_base = OTHER; note = 2'-fluoro modified nucleotide
  modified_base 7: mod_base = OTHER; note = 2'-O-methyl modified nucleotide
  modified_base 8: mod_base = OTHER; note = 2'-fluoro modified nucleotide
  modified_base 9: mod_base = OTHER; note = 2'-O-methyl modified nucleotide
  modified_base 10: mod_base = OTHER; note = 2'-fluoro modified nucleotide
  modified_base 11: mod_base = OTHER; note = 2'-O-methyl modified nucleotide
  modified_base 12: mod_base = OTHER; note = 2'-fluoro modified nucleotide
  modified_base 13: mod_base = OTHER; note = 2'-O-methyl modified nucleotide
  modified_base 14: mod_base = OTHER; note = 2'-fluoro modified nucleotide with phosphorothioate linkage
  modified_base 15: mod_base = OTHER; note = 2'-O-methyl modified nucleotide with phosphorothioate linkage
  modified_base 16: mod_base = OTHER; note = 2'-fluoro modified nucleotide with phosphorothioate linkage
  modified_base 17: mod_base = OTHER; note = 2'-O-methyl modified nucleotide with phosphorothioate linkage
  modified_base 18: mod_base = OTHER; note = 2'-fluoro modified nucleotide with phosphorothioate linkage
  modified_base 19: mod_base = OTHER; note = 2'-O-methyl modified nucleotide with phosphorothioate linkage
  modified_base 20: mod_base = OTHER; note = 2'-O-methyl modified nucleotide
  modified_base 21: mod_base = OTHER; note = 2'-fluoro modified nucleotide
  modified_base 22: mod_base = OTHER; note = 2'-O-methyl modified nucleotide
  modified_base 23: mod_base = OTHER; note = 2'-fluoro modified nucleotide
  modified_base 24: mod_base = OTHER; note = 2'-O-methyl modified nucleotide
  modified_base 25: mod_base = OTHER; note = 2'-fluoro modified nucleotide
  modified_base 26: mod_base = OTHER; note = 2'-O-methyl modified nucleotide
  modified_base 27: mod_base = OTHER; note = 2'-fluoro modified nucleotide
  modified_base 28: mod_base = OTHER; note = 2'-O-methyl modified nucleotide
  modified_base 29: mod_base = OTHER; note = 2'-fluoro modified nucleotide
  modified_base 30: mod_base = OTHER; note = 2'-O-methyl modified nucleotide
  modified_base 31: mod_base = OTHER; note = 2'-fluoro modified nucleotide with phosphorothioate linkage
  modified_base 32: mod_base = OTHER; note = 2'-O-methyl modified nucleotide with phosphorothioate linkage
  misc_difference 33: note = 2'-fluoro modified nucleotide may be attached to trivalent N-Acetylgalactosamine
tgcaagacatattctttaagaatatgtcttgca

SEQ ID NO: 968 - RNA, 33 nt, synthetic construct
  source 1..33: mol_type = other RNA
  misc_difference 1: note = 2'-O-methyl modified nucleotide with phosphorothioate linkage may be modified with 5'-Phosphate
  modified_base 2: mod_base = OTHER; note = 2'-fluoro modified nucleotide with phosphorothioate linkage
  modified_base 3: mod_base = OTHER; note = 2'-O-methyl modified nucleotide
  modified_base 4: mod_base = OTHER; note = 2'-fluoro modified nucleotide
  modified_base 5: mod_base = OTHER; note = 2'-O-methyl modified nucleotide
  modified_base 6: mod_base = OTHER; note = 2'-fluoro modified nucleotide
  modified_base 7: mod_base = OTHER; note = 2'-O-methyl modified nucleotide
  modified_base 8: mod_base = OTHER; note = 2'-fluoro modified nucleotide
  modified_base 9: mod_base = OTHER; note = 2'-O-methyl modified nucleotide
  modified_base 10: mod_base = OTHER; note = 2'-fluoro modified nucleotide
  modified_base 11: mod_base = OTHER; note = 2'-O-methyl modified nucleotide
  modified_base 12: mod_base = OTHER; note = 2'-fluoro modified nucleotide
  modified_base 13: mod_base = OTHER; note = 2'-O-methyl modified nucleotide
  modified_base 14: mod_base = OTHER; note = 2'-fluoro modified nucleotide with phosphorothioate linkage
  modified_base 15: mod_base = OTHER; note = 2'-O-methyl modified nucleotide with phosphorothioate linkage
  modified_base 16: mod_base = OTHER; note = 2'-fluoro modified nucleotide with phosphorothioate linkage
  modified_base 17: mod_base = OTHER; note = 2'-O-methyl modified nucleotide with phosphorothioate linkage
  modified_base 18: mod_base = OTHER; note = 2'-fluoro modified nucleotide with phosphorothioate linkage
  modified_base 19: mod_base = OTHER; note = 2'-O-methyl modified nucleotide with phosphorothioate linkage
  modified_base 20: mod_base = OTHER; note = 2'-O-methyl modified nucleotide
  modified_base 21: mod_base = OTHER; note = 2'-fluoro modified nucleotide
  modified_base 22: mod_base = OTHER; note = 2'-O-methyl modified nucleotide
  modified_base 23: mod_base = OTHER; note = 2'-fluoro modified nucleotide
  modified_base 24: mod_base = OTHER; note = 2'-O-methyl modified nucleotide
  modified_base 25: mod_base = OTHER; note = 2'-fluoro modified nucleotide
  modified_base 26: mod_base = OTHER; note = 2'-O-methyl modified nucleotide
  modified_base 27: mod_base = OTHER; note = 2'-fluoro modified nucleotide
  modified_base 28: mod_base = OTHER; note = 2'-O-methyl modified nucleotide
  modified_base 29: mod_base = OTHER; note = 2'-fluoro modified nucleotide
  modified_base 30: mod_base = OTHER; note = 2'-O-methyl modified nucleotide
  modified_base 31: mod_base = OTHER; note = 2'-fluoro modified nucleotide with phosphorothioate linkage
  modified_base 32: mod_base = OTHER; note = 2'-O-methyl modified nucleotide with phosphorothioate linkage
  misc_difference 33: note = 2'-fluoro modified nucleotide may be attached to trivalent N-Acetylgalactosamine
taaggccaatttccagaggggaaattggcctta

SEQ ID NO: 969 - RNA, 33 nt, synthetic construct
  source 1..33: mol_type = other RNA
  misc_difference 1: note = 2'-O-methyl modified nucleotide with phosphorothioate linkage may be modified with 5'-Phosphate
  modified_base 2: mod_base = OTHER; note = 2'-fluoro modified nucleotide with phosphorothioate linkage
  modified_base 3: mod_base = OTHER; note = 2'-O-methyl modified nucleotide
  modified_base 4: mod_base = OTHER; note = 2'-fluoro modified nucleotide
  modified_base 5: mod_base = OTHER; note = 2'-O-methyl modified nucleotide
  modified_base 6: mod_base = OTHER; note = 2'-fluoro modified nucleotide
  modified_base 7: mod_base = OTHER; note = 2'-O-methyl modified nucleotide
  modified_base 8: mod_base = OTHER; note = 2'-fluoro modified nucleotide
  modified_base 9: mod_base = OTHER; note = 2'-O-methyl modified nucleotide
  modified_base 10: mod_base = OTHER; note = 2'-fluoro modified nucleotide
  modified_base 11: mod_base = OTHER; note = 2'-O-methyl modified nucleotide
  modified_base 12: mod_base = OTHER; note = 2'-fluoro modified nucleotide
  modified_base 13: mod_base = OTHER; note = 2'-O-methyl modified nucleotide
  modified_base 14: mod_base = OTHER; note = 2'-fluoro modified nucleotide with phosphorothioate linkage
  modified_base 15: mod_base = OTHER; note = 2'-O-methyl modified nucleotide with phosphorothioate linkage
  modified_base 16: mod_base = OTHER; note = 2'-fluoro modified nucleotide with phosphorothioate linkage
  modified_base 17: mod_base = OTHER; note = 2'-O-methyl modified nucleotide with phosphorothioate linkage
  modified_base 18: mod_base = OTHER; note = 2'-fluoro modified nucleotide with phosphorothioate linkage
  modified_base 19: mod_base = OTHER; note = 2'-O-methyl modified nucleotide with phosphorothioate linkage
  modified_base 20: mod_base = OTHER; note = 2'-O-methyl modified nucleotide
  modified_base 21: mod_base = OTHER; note = 2'-fluoro modified nucleotide
  modified_base 22: mod_base = OTHER; note = 2'-O-methyl modified nucleotide
  modified_base 23: mod_base = OTHER; note = 2'-fluoro modified nucleotide
  modified_base 24: mod_base = OTHER; note = 2'-O-methyl modified nucleotide
  modified_base 25: mod_base = OTHER; note = 2'-fluoro modified nucleotide
  modified_base 26: mod_base = OTHER; note = 2'-O-methyl modified nucleotide
  modified_base 27: mod_base = OTHER; note = 2'-fluoro modified nucleotide
  modified_base 28: mod_base = OTHER; note = 2'-O-methyl modified nucleotide
  modified_base 29: mod_base = OTHER; note = 2'-fluoro modified nucleotide
  modified_base 30: mod_base = OTHER; note = 2'-O-methyl modified nucleotide
  modified_base 31: mod_base = OTHER; note = 2'-fluoro modified nucleotide with phosphorothioate linkage
  modified_base 32: mod_base = OTHER; note = 2'-O-methyl modified nucleotide with phosphorothioate linkage
  misc_difference 33: note = 2'-fluoro modified nucleotide may be attached to trivalent N-Acetylgalactosamine
taagtaattatagtgagttactataattactta

SEQ ID NO: 970 - RNA, 33 nt, synthetic construct
  source 1..33: mol_type = other RNA
  misc_difference 1: note = 2'-O-methyl modified nucleotide with phosphorothioate linkage may be modified with 5'-Phosphate
  modified_base 2: mod_base = OTHER; note = 2'-fluoro modified nucleotide with phosphorothioate linkage
  modified_base 3: mod_base = OTHER; note = 2'-O-methyl modified nucleotide
  modified_base 4: mod_base = OTHER; note = 2'-fluoro modified nucleotide
  modified_base 5: mod_base = OTHER; note = 2'-O-methyl modified nucleotide
  modified_base 6: mod_base = OTHER; note = 2'-fluoro modified nucleotide
  modified_base 7: mod_base = OTHER; note = 2'-O-methyl modified nucleotide
  modified_base 8: mod_base = OTHER; note = 2'-fluoro modified nucleotide
  modified_base 9: mod_base = OTHER; note = 2'-O-methyl modified nucleotide
  modified_base 10: mod_base = OTHER; note = 2'-fluoro modified nucleotide
  modified_base 11: mod_base = OTHER; note = 2'-O-methyl modified nucleotide
  modified_base 12: mod_base = OTHER; note = 2'-fluoro modified nucleotide
  modified_base 13: mod_base = OTHER; note = 2'-O-methyl modified nucleotide
  modified_base 14: mod_base = OTHER; note = 2'-fluoro modified nucleotide with phosphorothioate linkage
  modified_base 15: mod_base = OTHER; note = 2'-O-methyl modified nucleotide with phosphorothioate linkage
  modified_base 16: mod_base = OTHER; note = 2'-fluoro modified nucleotide with phosphorothioate linkage
  modified_base 17: mod_base = OTHER; note = 2'-O-methyl modified nucleotide with phosphorothioate linkage
  modified_base 18: mod_base = OTHER; note = 2'-fluoro modified nucleotide with phosphorothioate linkage
  modified_base 19: mod_base = OTHER; note = 2'-O-methyl modified nucleotide with phosphorothioate linkage
  modified_base 20: mod_base = OTHER; note = 2'-O-methyl modified nucleotide
  modified_base 21: mod_base = OTHER; note = 2'-fluoro modified nucleotide
  modified_base 22: mod_base = OTHER; note = 2'-O-methyl modified nucleotide
  modified_base 23: mod_base = OTHER; note = 2'-fluoro modified nucleotide
  modified_base 24: mod_base = OTHER; note = 2'-O-methyl modified nucleotide
  modified_base 25: mod_base = OTHER; note = 2'-fluoro modified nucleotide
  modified_base 26: mod_base = OTHER; note = 2'-O-methyl modified nucleotide
  modified_base 27: mod_base = OTHER; note = 2'-fluoro modified nucleotide
  modified_base 28: mod_base = OTHER; note = 2'-O-methyl modified nucleotide
  modified_base 29: mod_base = OTHER; note = 2'-fluoro modified nucleotide
  modified_base 30: mod_base = OTHER; note = 2'-O-methyl modified nucleotide
  modified_base 31: mod_base = OTHER; note = 2'-fluoro modified nucleotide with phosphorothioate linkage
  modified_base 32: mod_base = OTHER; note = 2'-O-methyl modified nucleotide with phosphorothioate linkage
  misc_difference 33: note = 2'-fluoro modified nucleotide may be attached to trivalent N-Acetylgalactosamine
ttaaaatcaagtaattatattacttgattttaa

SEQ ID NO: 971 - RNA, 33 nt, synthetic construct
  source 1..33: mol_type = other RNA
  misc_difference 1: note = 2'-O-methyl modified nucleotide with phosphorothioate linkage may be modified with 5'-Phosphate
  modified_base 2: mod_base = OTHER; note = 2'-fluoro modified nucleotide with phosphorothioate linkage
  modified_base 3: mod_base = OTHER; note = 2'-O-methyl modified nucleotide
  modified_base 4: mod_base = OTHER; note = 2'-fluoro modified nucleotide
  modified_base 5: mod_base = OTHER; note = 2'-O-methyl modified nucleotide
  modified_base 6: mod_base = OTHER; note = 2'-fluoro modified nucleotide
  modified_base 7: mod_base = OTHER; note = 2'-O-methyl modified nucleotide
  modified_base 8: mod_base = OTHER; note = 2'-fluoro modified nucleotide
  modified_base 9: mod_base = OTHER; note = 2'-O-methyl modified nucleotide
  modified_base 10: mod_base = OTHER; note = 2'-fluoro modified nucleotide
  modified_base 11: mod_base = OTHER; note = 2'-O-methyl modified nucleotide
  modified_base 12: mod_base = OTHER; note = 2'-fluoro modified nucleotide
  modified_base 13: mod_base = OTHER; note = 2'-O-methyl modified nucleotide
  modified_base 14: mod_base = OTHER; note = 2'-fluoro modified nucleotide with phosphorothioate linkage
  modified_base 15: mod_base = OTHER; note = 2'-O-methyl modified nucleotide with phosphorothioate linkage
  modified_base 16: mod_base = OTHER; note = 2'-fluoro modified nucleotide with phosphorothioate linkage
  modified_base 17: mod_base = OTHER; note = 2'-O-methyl modified nucleotide with phosphorothioate linkage
  modified_base 18: mod_base = OTHER; note = 2'-fluoro modified nucleotide with phosphorothioate linkage
  modified_base 19: mod_base = OTHER; note = 2'-O-methyl modified nucleotide with phosphorothioate linkage
  modified_base 20: mod_base = OTHER; note = 2'-O-methyl modified nucleotide
  modified_base 21: mod_base = OTHER; note = 2'-fluoro modified nucleotide
  modified_base 22: mod_base = OTHER; note = 2'-O-methyl modified nucleotide
  modified_base 23: mod_base = OTHER; note = 2'-fluoro modified nucleotide
  modified_base 24: mod_base = OTHER; note = 2'-O-methyl modified nucleotide
  modified_base 25: mod_base = OTHER; note = 2'-fluoro modified nucleotide
  modified_base 26: mod_base = OTHER; note = 2'-O-methyl modified nucleotide
  modified_base 27: mod_base = OTHER; note = 2'-fluoro modified nucleotide
  modified_base 28: mod_base = OTHER; note = 2'-O-methyl modified nucleotide
  modified_base 29: mod_base = OTHER; note = 2'-fluoro modified nucleotide
  modified_base 30: mod_base = OTHER; note = 2'-O-methyl modified nucleotide
  modified_base 31: mod_base = OTHER; note = 2'-fluoro modified nucleotide with phosphorothioate linkage
  modified_base 32: mod_base = OTHER; note = 2'-O-methyl modified nucleotide with phosphorothioate linkage
  misc_difference 33: note = 2'-fluoro modified nucleotide may be attached to trivalent N-Acetylgalactosamine
ttcaagtaattatagtgagtataattacttgaa

SEQ ID NO: 972 - RNA, 33 nt, synthetic construct
  source 1..33: mol_type = other RNA
  misc_difference 1: note = 2'-O-methyl modified nucleotide with phosphorothioate linkage may be modified with 5'-Phosphate
  modified_base 2: mod_base = OTHER; note = 2'-fluoro modified nucleotide with phosphorothioate linkage
  modified_base 3: mod_base = OTHER; note = 2'-O-methyl modified nucleotide
  modified_base 4: mod_base = OTHER; note = 2'-fluoro modified nucleotide
  modified_base 5: mod_base = OTHER; note = 2'-O-methyl modified nucleotide
  modified_base 6: mod_base = OTHER; note = 2'-fluoro modified nucleotide
  modified_base 7: mod_base = OTHER; note = 2'-O-methyl modified nucleotide
  modified_base 8: mod_base = OTHER; note = 2'-fluoro modified nucleotide
  modified_base 9: mod_base = OTHER; note = 2'-O-methyl modified nucleotide
  modified_base 10: mod_base = OTHER; note = 2'-fluoro modified nucleotide
  modified_base 11: mod_base = OTHER; note = 2'-O-methyl modified nucleotide
  modified_base 12: mod_base = OTHER; note = 2'-fluoro modified nucleotide
  modified_base 13: mod_base = OTHER; note = 2'-O-methyl modified nucleotide
  modified_base 14: mod_base = OTHER; note = 2'-fluoro modified nucleotide with phosphorothioate linkage
  modified_base 15: mod_base = OTHER; note = 2'-O-methyl modified nucleotide with phosphorothioate linkage
  modified_base 16: mod_base = OTHER; note = 2'-fluoro modified nucleotide with phosphorothioate linkage
  modified_base 17: mod_base = OTHER; note = 2'-O-methyl modified nucleotide with phosphorothioate linkage
  modified_base 18: mod_base = OTHER; note = 2'-fluoro modified nucleotide with phosphorothioate linkage
  modified_base 19: mod_base = OTHER; note = 2'-O-methyl modified nucleotide with phosphorothioate linkage
  modified_base 20: mod_base = OTHER; note = 2'-O-methyl modified nucleotide
  modified_base 21: mod_base = OTHER; note = 2'-fluoro modified nucleotide
  modified_base 22: mod_base = OTHER; note = 2'-O-methyl modified nucleotide
  modified_base 23: mod_base = OTHER; note = 2'-fluoro modified nucleotide
  modified_base 24: mod_base = OTHER; note = 2'-O-methyl modified nucleotide
  modified_base 25: mod_base = OTHER; note = 2'-fluoro modified nucleotide
  modified_base 26: mod_base = OTHER; note = 2'-O-methyl modified nucleotide
  modified_base 27: mod_base = OTHER; note = 2'-fluoro modified nucleotide
  modified_base 28: mod_base = OTHER; note = 2'-O-methyl modified nucleotide
  modified_base 29: mod_base = OTHER; note = 2'-fluoro modified nucleotide
  modified_base 30: mod_base = OTHER; note = 2'-O-methyl modified nucleotide
  modified_base 31: mod_base = OTHER; note = 2'-fluoro modified nucleotide with phosphorothioate linkage
  modified_base 32: mod_base = OTHER; note = 2'-O-methyl modified nucleotide with phosphorothioate linkage
  misc_difference 33: note = 2'-fluoro modified nucleotide may be attached to trivalent N-Acetylgalactosamine
tccaatttccagaggaagcctctggaaattgga

SEQ ID NO: 973 - RNA, 33 nt, synthetic construct
  source 1..33: mol_type = other RNA
  misc_difference 1: note = 2'-O-methyl modified nucleotide with phosphorothioate linkage may be modified with 5'-Phosphate
  modified_base 2: mod_base = OTHER; note = 2'-fluoro modified nucleotide with phosphorothioate linkage
  modified_base 3: mod_base = OTHER; note = 2'-O-methyl modified nucleotide
  modified_base 4: mod_base = OTHER; note = 2'-fluoro modified nucleotide
  modified_base 5: mod_base = OTHER; note = 2'-O-methyl modified nucleotide
  modified_base 6: mod_base = OTHER; note = 2'-fluoro modified nucleotide
  modified_base 7: mod_base = OTHER; note = 2'-O-methyl modified nucleotide
  modified_base 8: mod_base = OTHER; note = 2'-fluoro modified nucleotide
  modified_base 9: mod_base = OTHER; note = 2'-O-methyl modified nucleotide
  modified_base 10: mod_base = OTHER; note = 2'-fluoro modified nucleotide
  modified_base 11: mod_base = OTHER; note = 2'-O-methyl modified nucleotide
  modified_base 12: mod_base = OTHER; note = 2'-fluoro modified nucleotide
  modified_base 13: mod_base = OTHER; note = 2'-O-methyl modified nucleotide
  modified_base 14: mod_base = OTHER; note = 2'-fluoro modified nucleotide with phosphorothioate linkage
  modified_base 15: mod_base = OTHER; note = 2'-O-methyl modified nucleotide with phosphorothioate linkage
  modified_base 16: mod_base = OTHER; note = 2'-fluoro modified nucleotide with phosphorothioate linkage
  modified_base 17: mod_base = OTHER; note = 2'-O-methyl modified nucleotide with phosphorothioate linkage
  modified_base 18: mod_base = OTHER; note = 2'-fluoro modified nucleotide with phosphorothioate linkage
  modified_base 19: mod_base = OTHER; note = 2'-O-methyl modified nucleotide with phosphorothioate linkage
  modified_base 20: mod_base = OTHER; note = 2'-O-methyl modified nucleotide
  modified_base 21: mod_base = OTHER; note = 2'-fluoro modified nucleotide
  modified_base 22: mod_base = OTHER; note = 2'-O-methyl modified nucleotide
  modified_base 23: mod_base = OTHER; note = 2'-fluoro modified nucleotide
  modified_base 24: mod_base = OTHER; note = 2'-O-methyl modified nucleotide
  modified_base 25: mod_base = OTHER; note = 2'-fluoro modified nucleotide
  modified_base 26: mod_base = OTHER; note = 2'-O-methyl modified nucleotide
  modified_base 27: mod_base = OTHER; note = 2'-fluoro modified nucleotide
  modified_base 28: mod_base = OTHER; note = 2'-O-methyl modified nucleotide
  modified_base 29: mod_base = OTHER; note = 2'-fluoro modified nucleotide
  modified_base 30: mod_base = OTHER; note = 2'-O-methyl modified nucleotide
  modified_base 31: mod_base = OTHER; note = 2'-fluoro modified nucleotide with phosphorothioate linkage
  modified_base 32: mod_base = OTHER; note = 2'-O-methyl modified nucleotide with phosphorothioate linkage
  misc_difference 33: note = 2'-fluoro modified nucleotide may be attached to trivalent N-Acetylgalactosamine
tgtaattatagtgagttattcactataattaca

SEQ ID NO: 974 - RNA, 33 nt, synthetic construct; identical to SEQ ID NO: 524
  source 1..33: mol_type = other RNA
  misc_difference 1: note = 2'-O-methyl modified nucleotide with phosphorothioate linkage may be modified with 5'-Phosphate
  modified_base 2: mod_base = OTHER; note = 2'-fluoro modified nucleotide with phosphorothioate linkage
  modified_base 3: mod_base = OTHER; note = 2'-O-methyl modified nucleotide
  modified_base 4: mod_base = OTHER; note = 2'-fluoro modified nucleotide
  modified_base 5: mod_base = OTHER; note = 2'-O-methyl modified nucleotide
  modified_base 6: mod_base = OTHER; note = 2'-fluoro modified nucleotide
  modified_base 7: mod_base = OTHER; note = 2'-O-methyl modified nucleotide
  modified_base 8: mod_base = OTHER; note = 2'-fluoro modified nucleotide
  modified_base 9: mod_base = OTHER; note = 2'-O-methyl modified nucleotide
  modified_base 10: mod_base = OTHER; note = 2'-fluoro modified nucleotide
  modified_base 11: mod_base = OTHER; note = 2'-O-methyl modified nucleotide
  modified_base 12: mod_base = OTHER; note = 2'-fluoro modified nucleotide
  modified_base 13: mod_base = OTHER; note = 2'-O-methyl modified nucleotide
  modified_base 14: mod_base = OTHER; note = 2'-fluoro modified nucleotide with phosphorothioate linkage
  modified_base 15: mod_base = OTHER; note = 2'-O-methyl modified nucleotide with phosphorothioate linkage
  modified_base 16: mod_base = OTHER; note = 2'-fluoro modified nucleotide with phosphorothioate linkage
  modified_base 17: mod_base = OTHER; note = 2'-O-methyl modified nucleotide with phosphorothioate linkage
  modified_base 18: mod_base = OTHER; note = 2'-fluoro modified nucleotide with phosphorothioate linkage
  modified_base 19: mod_base = OTHER; note = 2'-O-methyl modified nucleotide with phosphorothioate linkage
  modified_base 20: mod_base = OTHER; note = 2'-O-methyl modified nucleotide
  modified_base 21: mod_base = OTHER; note = 2'-fluoro modified nucleotide
  modified_base 22: mod_base = OTHER; note = 2'-O-methyl modified nucleotide
  modified_base 23: mod_base = OTHER; note = 2'-fluoro modified nucleotide
  modified_base 24: mod_base = OTHER; note = 2'-O-methyl modified nucleotide
  modified_base 25: mod_base = OTHER; note = 2'-fluoro modified nucleotide
  modified_base 26: mod_base = OTHER; note = 2'-O-methyl modified nucleotide
  modified_base 27: mod_base = OTHER; note = 2'-fluoro modified nucleotide
  modified_base 28: mod_base = OTHER; note = 2'-O-methyl modified nucleotide
  modified_base 29: mod_base = OTHER; note = 2'-fluoro modified nucleotide
  modified_base 30: mod_base = OTHER; note = 2'-O-methyl modified nucleotide
  modified_base 31: mod_base = OTHER; note = 2'-fluoro modified nucleotide with phosphorothioate linkage
  modified_base 32: mod_base = OTHER; note = 2'-O-methyl modified nucleotide with phosphorothioate linkage
  misc_difference 33: note = 2'-fluoro modified nucleotide may be attached to trivalent N-Acetylgalactosamine

SEQ ID NO: 975 - RNA, 33 nt, synthetic construct
  source 1..33: mol_type = other RNA
  misc_difference 1: note = 2'-O-methyl modified nucleotide with phosphorothioate linkage may be modified with 5'-Phosphate
  modified_base 2: mod_base = OTHER; note = 2'-fluoro modified nucleotide with phosphorothioate linkage
  modified_base 3: mod_base = OTHER; note = 2'-O-methyl modified nucleotide
  modified_base 4: mod_base = OTHER; note = 2'-fluoro modified nucleotide
  modified_base 5: mod_base = OTHER; note = 2'-O-methyl modified nucleotide
  modified_base 6: mod_base = OTHER; note = 2'-fluoro modified nucleotide
  modified_base 7: mod_base = OTHER; note = 2'-O-methyl modified nucleotide
  modified_base 8: mod_base = OTHER; note = 2'-fluoro modified nucleotide
  modified_base 9: mod_base = OTHER; note = 2'-O-methyl modified nucleotide
  modified_base 10: mod_base = OTHER; note = 2'-fluoro modified nucleotide
  modified_base 11: mod_base = OTHER; note = 2'-O-methyl modified nucleotide
  modified_base 12: mod_base = OTHER; note = 2'-fluoro modified nucleotide
  modified_base 13: mod_base = OTHER; note = 2'-O-methyl modified nucleotide
  modified_base 14: mod_base = OTHER; note = 2'-fluoro modified nucleotide with phosphorothioate linkage
  modified_base 15: mod_base = OTHER; note = 2'-O-methyl modified nucleotide with phosphorothioate linkage
  modified_base 16: mod_base = OTHER; note = 2'-fluoro modified nucleotide with phosphorothioate linkage
  modified_base 17: mod_base = OTHER; note = 2'-O-methyl modified nucleotide with phosphorothioate linkage
  modified_base 18: mod_base = OTHER; note = 2'-fluoro modified nucleotide with phosphorothioate linkage
  modified_base 19: mod_base = OTHER; note = 2'-O-methyl modified nucleotide with phosphorothioate linkage
  modified_base 20: mod_base = OTHER; note = 2'-O-methyl modified nucleotide
  modified_base 21: mod_base = OTHER; note = 2'-fluoro modified nucleotide
  modified_base 22: mod_base = OTHER; note = 2'-O-methyl modified nucleotide
  modified_base 23: mod_base = OTHER; note = 2'-fluoro modified nucleotide
  modified_base 24: mod_base = OTHER; note = 2'-O-methyl modified nucleotide
  modified_base 25: mod_base = OTHER; note = 2'-fluoro modified nucleotide
  modified_base 26: mod_base = OTHER; note = 2'-O-methyl modified nucleotide
  modified_base 27: mod_base = OTHER; note = 2'-fluoro modified nucleotide
  modified_base 28: mod_base = OTHER; note = 2'-O-methyl modified nucleotide
  modified_base 29: mod_base = OTHER; note = 2'-fluoro modified nucleotide
  modified_base 30: mod_base = OTHER; note = 2'-O-methyl modified nucleotide
  modified_base 31: mod_base = OTHER; note = 2'-fluoro modified nucleotide with phosphorothioate linkage
  modified_base 32: mod_base = OTHER; note = 2'-O-methyl modified nucleotide with phosphorothioate linkage
  misc_difference 33: note = 2'-fluoro modified nucleotide may be attached to trivalent N-Acetylgalactosamine
tactgctgtttcagaatcactgaaacagcagta

SEQ ID NO: 976 - RNA, 33 nt, synthetic construct
  source 1..33: mol_type = other RNA
  misc_difference 1: note = 2'-O-methyl modified nucleotide with phosphorothioate linkage may be modified with 5'-Phosphate
  modified_base 2: mod_base = OTHER; note = 2'-fluoro modified nucleotide with phosphorothioate linkage
  modified_base 3: mod_base = OTHER; note = 2'-O-methyl modified nucleotide
  modified_base 4: mod_base = OTHER; note = 2'-fluoro modified nucleotide
  modified_base 5: mod_base = OTHER; note = 2'-O-methyl modified nucleotide
  modified_base 6: mod_base = OTHER; note = 2'-fluoro modified nucleotide
  modified_base 7: mod_base = OTHER; note = 2'-O-methyl modified nucleotide
  modified_base 8: mod_base = OTHER; note = 2'-fluoro modified nucleotide
  modified_base 9: mod_base = OTHER; note = 2'-O-methyl modified nucleotide
  modified_base 10: mod_base = OTHER; note = 2'-fluoro modified nucleotide
  modified_base 11: mod_base = OTHER; note = 2'-O-methyl modified nucleotide
  modified_base 12: mod_base = OTHER; note = 2'-fluoro modified nucleotide
  modified_base 13: mod_base = OTHER; note = 2'-O-methyl modified nucleotide
  modified_base 14: mod_base = OTHER; note = 2'-fluoro modified nucleotide with phosphorothioate linkage
  modified_base 15: mod_base = OTHER; note = 2'-O-methyl modified nucleotide with phosphorothioate linkage
  modified_base 16: mod_base = OTHER; note = 2'-fluoro modified nucleotide with phosphorothioate linkage
  modified_base 17: mod_base = OTHER; note = 2'-O-methyl modified nucleotide with phosphorothioate linkage
  modified_base 18: mod_base = OTHER; note = 2'-fluoro modified nucleotide with phosphorothioate linkage
  modified_base 19: mod_base = OTHER; note = 2'-O-methyl modified nucleotide with phosphorothioate linkage
  modified_base 20: mod_base = OTHER; note = 2'-O-methyl modified nucleotide
  modified_base 21: mod_base = OTHER; note = 2'-fluoro modified nucleotide
  modified_base 22: mod_base = OTHER; note = 2'-O-methyl modified nucleotide
  modified_base 23: mod_base = OTHER; note = 2'-fluoro modified nucleotide
  modified_base 24: mod_base = OTHER; note = 2'-O-methyl modified nucleotide
  modified_base 25: mod_base = OTHER; note = 2'-fluoro modified nucleotide
  modified_base 26: mod_base = OTHER; note = 2'-O-methyl modified nucleotide
  modified_base 27: mod_base = OTHER; note = 2'-fluoro modified nucleotide
  modified_base 28: mod_base = OTHER; note = 2'-O-methyl modified nucleotide
  modified_base 29: mod_base = OTHER; note = 2'-fluoro modified nucleotide
  modified_base 30: mod_base = OTHER; note = 2'-O-methyl modified nucleotide
  modified_base 31: mod_base = OTHER; note = 2'-fluoro modified nucleotide with phosphorothioate linkage
  modified_base 32: mod_base = OTHER; note = 2'-O-methyl modified nucleotide with phosphorothioate linkage
  misc_difference 33: note = 2'-fluoro modified nucleotide may be attached to trivalent N-Acetylgalactosamine
tctgctgtttcagaatcaatctgaaacagcaga

SEQ ID NO: 977 - RNA, 33 nt, synthetic construct
  source 1..33: mol_type = other RNA
  misc_difference 1: note = 2'-O-methyl modified nucleotide with phosphorothioate linkage may be modified with 5'-Phosphate
  modified_base 2: mod_base = OTHER; note = 2'-fluoro modified nucleotide with phosphorothioate linkage
  modified_base 3: mod_base = OTHER; note = 2'-O-methyl modified nucleotide
  modified_base 4: mod_base = OTHER; note = 2'-fluoro modified nucleotide
  modified_base 5: mod_base = OTHER; note = 2'-O-methyl modified nucleotide
  modified_base 6: mod_base = OTHER; note = 2'-fluoro modified nucleotide
  modified_base 7: mod_base = OTHER; note = 2'-O-methyl modified nucleotide
  modified_base 8: mod_base = OTHER; note = 2'-fluoro modified nucleotide
  modified_base 9: mod_base = OTHER; note = 2'-O-methyl modified nucleotide
  modified_base 10: mod_base = OTHER; note = 2'-fluoro modified nucleotide
  modified_base 11: mod_base = OTHER; note = 2'-O-methyl modified nucleotide
  modified_base 12: mod_base = OTHER; note = 2'-fluoro modified nucleotide
  modified_base 13: mod_base = OTHER; note = 2'-O-methyl modified nucleotide
  modified_base 14: mod_base = OTHER; note = 2'-fluoro modified nucleotide with phosphorothioate linkage
  modified_base 15: mod_base = OTHER; note = 2'-O-methyl modified nucleotide with phosphorothioate linkage
  modified_base 16: mod_base = OTHER; note = 2'-fluoro modified nucleotide with phosphorothioate linkage
  modified_base 17: mod_base = OTHER; note = 2'-O-methyl modified nucleotide with phosphorothioate linkage
  modified_base 18: mod_base = OTHER; note = 2'-fluoro modified nucleotide with phosphorothioate linkage
  modified_base 19: mod_base = OTHER; note = 2'-O-methyl modified nucleotide with phosphorothioate linkage
  modified_base 20: mod_base = OTHER; note = 2'-O-methyl modified nucleotide
  modified_base 21: mod_base = OTHER; note = 2'-fluoro modified nucleotide
  modified_base 22: mod_base = OTHER; note = 2'-O-methyl modified nucleotide
  modified_base 23: mod_base = OTHER; note = 2'-fluoro modified nucleotide
  modified_base 24: mod_base = OTHER; note = 2'-O-methyl modified nucleotide
  modified_base 25: mod_base = OTHER; note = 2'-fluoro modified nucleotide
  modified_base 26: mod_base = OTHER; note = 2'-O-methyl modified nucleotide
  modified_base 27: mod_base = OTHER; note = 2'-fluoro modified nucleotide
  modified_base 28: mod_base = OTHER; note = 2'-O-methyl modified nucleotide
  modified_base 29: mod_base = OTHER; note = 2'-fluoro modified nucleotide
  modified_base 30: mod_base = OTHER; note = 2'-O-methyl modified nucleotide
  modified_base 31: mod_base = OTHER; note = 2'-fluoro modified nucleotide with phosphorothioate linkage
  modified_base 32: mod_base = OTHER; note = 2'-O-methyl modified nucleotide with phosphorothioate linkage
  misc_difference 33: note = 2'-fluoro modified nucleotide may be attached to trivalent N-Acetylgalactosamine
ttataaaggtacttgttgtaagtacctttataa

SEQ ID NO: 978 - RNA, 33 nt, synthetic construct; identical to SEQ ID NO: 528
  source 1..33: mol_type = other RNA
  misc_difference 1: note = 2'-O-methyl modified nucleotide with phosphorothioate linkage may be modified with 5'-Phosphate
  modified_base 2: mod_base = OTHER; note = 2'-fluoro modified nucleotide with phosphorothioate linkage
  modified_base 3: mod_base = OTHER; note = 2'-O-methyl modified nucleotide
  modified_base 4: mod_base = OTHER; note = 2'-fluoro modified nucleotide
  modified_base 5: mod_base = OTHER; note = 2'-O-methyl modified nucleotide
  modified_base 6: mod_base = OTHER; note = 2'-fluoro modified nucleotide
  modified_base 7: mod_base = OTHER; note = 2'-O-methyl modified nucleotide
  modified_base 8: mod_base = OTHER; note = 2'-fluoro modified nucleotide
  modified_base 9: mod_base = OTHER; note = 2'-O-methyl modified nucleotide
  modified_base 10: mod_base = OTHER; note = 2'-fluoro modified nucleotide
  modified_base 11: mod_base = OTHER; note = 2'-O-methyl modified nucleotide
  modified_base 12: mod_base = OTHER; note = 2'-fluoro modified nucleotide
  modified_base 13: mod_base = OTHER; note = 2'-O-methyl modified nucleotide
  modified_base 14: mod_base = OTHER; note = 2'-fluoro modified nucleotide with phosphorothioate linkage
  modified_base 15: mod_base = OTHER; note = 2'-O-methyl modified nucleotide with phosphorothioate linkage
  modified_base 16: mod_base = OTHER; note = 2'-fluoro modified nucleotide with phosphorothioate linkage
  modified_base 17: mod_base = OTHER; note = 2'-O-methyl modified nucleotide with phosphorothioate linkage
  modified_base 18: mod_base = OTHER; note = 2'-fluoro modified nucleotide with phosphorothioate linkage
  modified_base 19: mod_base = OTHER; note = 2'-O-methyl modified nucleotide with phosphorothioate linkage
  modified_base 20: mod_base = OTHER; note = 2'-O-methyl modified nucleotide
  modified_base 21: mod_base = OTHER; note = 2'-fluoro modified nucleotide
  modified_base 22: mod_base = OTHER; note = 2'-O-methyl modified nucleotide
  modified_base 23: mod_base = OTHER; note = 2'-fluoro modified nucleotide
  modified_base 24: mod_base = OTHER; note = 2'-O-methyl modified nucleotide
  modified_base 25: mod_base = OTHER; note = 2'-fluoro modified nucleotide
  modified_base 26: mod_base = OTHER; note = 2'-O-methyl modified nucleotide
  modified_base 27: mod_base = OTHER; note = 2'-fluoro modified nucleotide
  modified_base 28: mod_base = OTHER; note = 2'-O-methyl modified nucleotide
  modified_base 29: mod_base = OTHER; note = 2'-fluoro modified nucleotide
  modified_base 30: mod_base = OTHER; note = 2'-O-methyl modified nucleotide
  modified_base 31: mod_base = OTHER; note = 2'-fluoro modified nucleotide with phosphorothioate linkage
  modified_base 32: mod_base = OTHER; note = 2'-O-methyl modified nucleotide with phosphorothioate linkage
  misc_difference 33: note = 2'-fluoro modified nucleotide may be attached to trivalent N-Acetylgalactosamine

SEQ ID NO: 979 - RNA, 33 nt, synthetic construct
  source 1..33: mol_type = other RNA
  misc_difference 1: note = 2'-O-methyl modified nucleotide with phosphorothioate linkage may be modified with 5'-Phosphate
  modified_base 2: mod_base = OTHER; note = 2'-fluoro modified nucleotide with phosphorothioate linkage
  modified_base 3: mod_base = OTHER; note = 2'-O-methyl modified nucleotide
  modified_base 4: mod_base = OTHER; note = 2'-fluoro modified nucleotide
  modified_base 5: mod_base = OTHER; note = 2'-O-methyl modified nucleotide
  modified_base 6: mod_base = OTHER; note = 2'-fluoro modified nucleotide
  modified_base 7: mod_base = OTHER; note = 2'-O-methyl modified nucleotide
  modified_base 8: mod_base = OTHER; note = 2'-fluoro modified nucleotide
  modified_base 9: mod_base = OTHER; note = 2'-O-methyl modified nucleotide
  modified_base 10: mod_base = OTHER; note = 2'-fluoro modified nucleotide
  modified_base 11: mod_base = OTHER; note = 2'-O-methyl modified nucleotide
  modified_base 12: mod_base = OTHER; note = 2'-fluoro modified nucleotide
  modified_base 13: mod_base = OTHER; note = 2'-O-methyl modified nucleotide
  modified_base 14: mod_base = OTHER; note = 2'-fluoro modified nucleotide with phosphorothioate linkage
  modified_base 15: mod_base = OTHER; note = 2'-O-methyl modified nucleotide with phosphorothioate linkage
  modified_base 16: mod_base = OTHER; note = 2'-fluoro modified nucleotide with phosphorothioate linkage
  modified_base 17: mod_base = OTHER; note = 2'-O-methyl modified nucleotide with phosphorothioate linkage
  modified_base 18: mod_base = OTHER; note = 2'-fluoro modified nucleotide with phosphorothioate linkage
  modified_base 19: mod_base = OTHER; note = 2'-O-methyl modified nucleotide with phosphorothioate linkage
  modified_base 20: mod_base = OTHER; note = 2'-O-methyl modified nucleotide
  modified_base 21: mod_base = OTHER; note = 2'-fluoro modified nucleotide
  modified_base 22: mod_base = OTHER; note = 2'-O-methyl modified nucleotide
  modified_base 23: mod_base = OTHER; note = 2'-fluoro modified nucleotide
  modified_base 24: mod_base = OTHER; note = 2'-O-methyl modified nucleotide
  modified_base 25: mod_base = OTHER; note = 2'-fluoro modified nucleotide
  modified_base 26: mod_base = OTHER; note = 2'-O-methyl modified nucleotide
  modified_base 27: mod_base = OTHER; note = 2'-fluoro modified nucleotide
  modified_base 28: mod_base = OTHER; note = 2'-O-methyl modified nucleotide
  modified_base 29: mod_base = OTHER; note = 2'-fluoro modified nucleotide
  modified_base 30: mod_base = OTHER; note = 2'-O-methyl modified nucleotide
  modified_base 31: mod_base = OTHER; note = 2'-fluoro modified nucleotide with phosphorothioate linkage
  modified_base 32: mod_base = OTHER; note = 2'-O-methyl modified nucleotide with phosphorothioate linkage
  misc_difference 33: note = 2'-fluoro modified nucleotide may be attached to trivalent N-Acetylgalactosamine
tgtaactttggctgagagacagccaaagttaca

SEQ ID NO: 980 - RNA, 33 nt, synthetic construct; identical to SEQ ID NO: 530
  source 1..33: mol_type = other RNA
  misc_difference 1: note = 2'-O-methyl modified nucleotide with phosphorothioate linkage may be modified with 5'-Phosphate
  modified_base 2: mod_base = OTHER; note = 2'-fluoro modified nucleotide with phosphorothioate linkage
  modified_base 3: mod_base = OTHER; note = 2'-O-methyl modified nucleotide
  modified_base 4: mod_base = OTHER; note = 2'-fluoro modified nucleotide
  modified_base 5: mod_base = OTHER; note = 2'-O-methyl modified nucleotide
  modified_base 6: mod_base = OTHER; note = 2'-fluoro modified nucleotide
  modified_base 7: mod_base = OTHER; note = 2'-O-methyl modified nucleotide
  modified_base 8: mod_base = OTHER; note = 2'-fluoro modified nucleotide
  modified_base 9: mod_base = OTHER; note = 2'-O-methyl modified nucleotide
  modified_base 10: mod_base = OTHER; note = 2'-fluoro modified nucleotide
  modified_base 11: mod_base = OTHER; note = 2'-O-methyl modified nucleotide
  modified_base 12: mod_base = OTHER; note = 2'-fluoro modified nucleotide
  modified_base 13: mod_base = OTHER; note = 2'-O-methyl modified nucleotide
  modified_base 14: mod_base = OTHER; note = 2'-fluoro modified nucleotide with phosphorothioate linkage
  modified_base 15: mod_base = OTHER; note = 2'-O-methyl modified nucleotide with phosphorothioate linkage
  modified_base 16: mod_base = OTHER; note = 2'-fluoro modified nucleotide with phosphorothioate linkage
  modified_base 17: mod_base = OTHER; note = 2'-O-methyl modified nucleotide with phosphorothioate linkage
  modified_base 18: mod_base = OTHER; note = 2'-fluoro modified nucleotide with phosphorothioate linkage
  modified_base 19: mod_base = OTHER; note = 2'-O-methyl modified nucleotide with phosphorothioate linkage
  modified_base 20: mod_base = OTHER; note = 2'-O-methyl modified nucleotide
  modified_base 21: mod_base = OTHER; note = 2'-fluoro modified nucleotide
  modified_base 22: mod_base = OTHER; note = 2'-O-methyl modified nucleotide
  modified_base 23: mod_base = OTHER; note = 2'-fluoro modified nucleotide
  modified_base 24: mod_base = OTHER; note = 2'-O-methyl modified nucleotide
  modified_base 25: mod_base = OTHER; note = 2'-fluoro modified nucleotide
  modified_base 26: mod_base = OTHER; note = 2'-O-methyl modified nucleotide
  modified_base 27: mod_base = OTHER; note = 2'-fluoro modified nucleotide
  modified_base 28: mod_base = OTHER; note = 2'-O-methyl modified nucleotide
  modified_base 29: mod_base = OTHER; note = 2'-fluoro modified nucleotide
  modified_base 30: mod_base = OTHER; note = 2'-O-methyl modified nucleotide
  modified_base 31: mod_base = OTHER; note = 2'-fluoro modified nucleotide with phosphorothioate linkage
  modified_base 32: mod_base = OTHER; note = 2'-O-methyl modified nucleotide with phosphorothioate linkage
  misc_difference 33: note = 2'-fluoro modified nucleotide may be attached to trivalent N-Acetylgalactosamine

SEQ ID NO: 981 - RNA, 33 nt, synthetic construct
  source 1..33: mol_type = other RNA
  misc_difference 1: note = 2'-O-methyl modified nucleotide with phosphorothioate linkage may be modified with 5'-Phosphate
  modified_base 2: mod_base = OTHER; note = 2'-fluoro modified nucleotide with phosphorothioate linkage
  modified_base 3: mod_base = OTHER; note = 2'-O-methyl modified nucleotide
  modified_base 4: mod_base = OTHER; note = 2'-fluoro modified nucleotide
  modified_base 5: mod_base = OTHER; note = 2'-O-methyl modified nucleotide
  modified_base 6: mod_base = OTHER; note = 2'-fluoro modified nucleotide
  modified_base 7: mod_base = OTHER; note = 2'-O-methyl modified nucleotide
  modified_base 8: mod_base = OTHER; note = 2'-fluoro modified nucleotide
  modified_base 9: mod_base = OTHER; note = 2'-O-methyl modified nucleotide
  modified_base 10: mod_base = OTHER; note = 2'-fluoro modified nucleotide
  modified_base 11: mod_base = OTHER; note = 2'-O-methyl modified nucleotide
  modified_base 12: mod_base = OTHER; note = 2'-fluoro modified nucleotide
  modified_base 13: mod_base = OTHER; note = 2'-O-methyl modified nucleotide
  modified_base 14: mod_base = OTHER; note = 2'-fluoro modified nucleotide with phosphorothioate linkage
  modified_base 15: mod_base = OTHER; note = 2'-O-methyl modified nucleotide with phosphorothioate linkage
  modified_base 16: mod_base = OTHER; note = 2'-fluoro modified nucleotide with phosphorothioate linkage
  modified_base 17: mod_base = OTHER; note = 2'-O-methyl modified nucleotide with phosphorothioate linkage
  modified_base 18: mod_base = OTHER; note = 2'-fluoro modified nucleotide with phosphorothioate linkage
  modified_base 19: mod_base = OTHER; note = 2'-O-methyl modified nucleotide with phosphorothioate linkage
  modified_base 20: mod_base = OTHER; note = 2'-O-methyl modified nucleotide
  modified_base 21: mod_base = OTHER; note = 2'-fluoro modified nucleotide
  modified_base 22: mod_base = OTHER; note = 2'-O-methyl modified nucleotide
  modified_base 23: mod_base = OTHER; note = 2'-fluoro modified nucleotide
  modified_base 24: mod_base = OTHER; note = 2'-O-methyl modified nucleotide
  modified_base 25: mod_base = OTHER; note = 2'-fluoro modified nucleotide
  modified_base 26: mod_base = OTHER; note = 2'-O-methyl modified nucleotide
  modified_base 27: mod_base = OTHER; note = 2'-fluoro modified nucleotide
  modified_base 28: mod_base = OTHER; note = 2'-O-methyl modified nucleotide
  modified_base 29: mod_base = OTHER; note = 2'-fluoro modified nucleotide
  modified_base 30: mod_base = OTHER; note = 2'-O-methyl modified nucleotide
  modified_base 31: mod_base = OTHER; note = 2'-fluoro modified nucleotide with phosphorothioate linkage
  modified_base 32: mod_base = OTHER; note = 2'-O-methyl modified nucleotide with phosphorothioate linkage
  misc_difference 33: note = 2'-fluoro modified nucleotide may be attached to trivalent N-Acetylgalactosamine
tcatattctttaacttcaagttaaagaatatga

SEQ ID NO: 982 - RNA, 33 nt, synthetic construct
  source 1..33: mol_type = other RNA
  misc_difference 1: note = 2'-O-methyl modified nucleotide with phosphorothioate linkage may be modified with 5'-Phosphate
  modified_base 2: mod_base = OTHER; note = 2'-fluoro modified nucleotide with phosphorothioate linkage
  modified_base 3: mod_base = OTHER; note = 2'-O-methyl modified nucleotide
  modified_base 4: mod_base = OTHER; note = 2'-fluoro modified nucleotide
  modified_base 5: mod_base = OTHER; note = 2'-O-methyl modified nucleotide
  modified_base 6: mod_base = OTHER; note = 2'-fluoro modified nucleotide
  modified_base 7: mod_base = OTHER; note = 2'-O-methyl modified nucleotide
  modified_base 8: mod_base = OTHER; note = 2'-fluoro modified nucleotide
  modified_base 9: mod_base = OTHER; note = 2'-O-methyl modified nucleotide
  modified_base 10: mod_base = OTHER; note = 2'-fluoro modified nucleotide
  modified_base 11: mod_base = OTHER; note = 2'-O-methyl modified nucleotide
  modified_base 12: mod_base = OTHER; note = 2'-fluoro modified nucleotide
  modified_base 13: mod_base = OTHER; note = 2'-O-methyl modified nucleotide
  modified_base 14: mod_base = OTHER; note = 2'-fluoro modified nucleotide with phosphorothioate linkage
  modified_base 15: mod_base = OTHER; note = 2'-O-methyl modified nucleotide with phosphorothioate linkage
  modified_base 16: mod_base = OTHER; note = 2'-fluoro modified nucleotide with phosphorothioate linkage
  modified_base 17: mod_base = OTHER; note = 2'-O-methyl modified nucleotide with phosphorothioate linkage
  modified_base 18: mod_base = OTHER; note = 2'-fluoro modified nucleotide with phosphorothioate linkage
  modified_base 19: mod_base = OTHER; note = 2'-O-methyl modified nucleotide with phosphorothioate linkage
  modified_base 20: mod_base = OTHER; note = 2'-O-methyl modified nucleotide
  modified_base 21: mod_base = OTHER; note = 2'-fluoro modified nucleotide
  modified_base 22: mod_base = OTHER; note = 2'-O-methyl modified nucleotide
  modified_base 23: mod_base = OTHER; note = 2'-fluoro modified nucleotide
  modified_base 24: mod_base = OTHER; note = 2'-O-methyl modified nucleotide
  modified_base 25: mod_base = OTHER; note = 2'-fluoro modified nucleotide
  modified_base 26: mod_base = OTHER; note = 2'-O-methyl modified nucleotide
  modified_base 27: mod_base = OTHER; note = 2'-fluoro modified nucleotide
  modified_base 28: mod_base = OTHER; note = 2'-O-methyl modified nucleotide
  modified_base 29: mod_base = OTHER; note = 2'-fluoro modified nucleotide
  modified_base 30: mod_base = OTHER; note = 2'-O-methyl modified nucleotide
  modified_base 31: mod_base = OTHER; note = 2'-fluoro modified nucleotide with phosphorothioate linkage
  modified_base 32: mod_base = OTHER; note = 2'-O-methyl modified nucleotide with phosphorothioate linkage
  misc_difference 33: note = 2'-fluoro modified nucleotide may be attached to trivalent N-Acetylgalactosamine
tagcagtccttttacactctaaaaggactgcta

SEQ ID NO: 983 - RNA, 33 nt, synthetic construct; identical to SEQ ID NO: 533
  source 1..33: mol_type = other RNA
  misc_difference 1: note = 2'-O-methyl modified nucleotide with phosphorothioate linkage may be modified with 5'-Phosphate
  modified_base 2: mod_base = OTHER; note = 2'-fluoro modified nucleotide with phosphorothioate linkage
  modified_base 3: mod_base = OTHER; note = 2'-O-methyl modified nucleotide
  modified_base 4: mod_base = OTHER; note = 2'-fluoro modified nucleotide
  modified_base 5: mod_base = OTHER; note = 2'-O-methyl modified nucleotide
  modified_base 6: mod_base = OTHER; note = 2'-fluoro modified nucleotide
  modified_base 7: mod_base = OTHER; note = 2'-O-methyl modified nucleotide
  modified_base 8: mod_base = OTHER; note = 2'-fluoro modified nucleotide
  modified_base 9: mod_base = OTHER; note = 2'-O-methyl modified nucleotide
  modified_base 10: mod_base = OTHER; note = 2'-fluoro modified nucleotide
  modified_base 11: mod_base = OTHER; note = 2'-O-methyl modified nucleotide
  modified_base 12: mod_base = OTHER; note = 2'-fluoro modified nucleotide
  modified_base 13: mod_base = OTHER; note = 2'-O-methyl modified nucleotide
  modified_base 14: mod_base = OTHER; note = 2'-fluoro modified nucleotide with phosphorothioate linkage
  modified_base 15: mod_base = OTHER; note = 2'-O-methyl modified nucleotide with phosphorothioate linkage
  modified_base 16: mod_base = OTHER; note = 2'-fluoro modified nucleotide with phosphorothioate linkage
  modified_base 17: mod_base = OTHER; note = 2'-O-methyl modified nucleotide with phosphorothioate linkage
  modified_base 18: mod_base = OTHER; note = 2'-fluoro modified nucleotide with phosphorothioate linkage
  modified_base 19: mod_base = OTHER; note = 2'-O-methyl modified nucleotide with phosphorothioate linkage
  modified_base 20: mod_base = OTHER; note = 2'-O-methyl modified nucleotide
  modified_base 21: mod_base = OTHER; note = 2'-fluoro modified nucleotide
  modified_base 22: mod_base = OTHER; note = 2'-O-methyl modified nucleotide
  modified_base 23: mod_base = OTHER; note = 2'-fluoro modified nucleotide
  modified_base 24: mod_base = OTHER; note = 2'-O-methyl modified nucleotide
  modified_base 25: mod_base = OTHER; note = 2'-fluoro modified nucleotide
  modified_base 26: mod_base = OTHER; note = 2'-O-methyl modified nucleotide
  modified_base 27: mod_base = OTHER; note = 2'-fluoro modified nucleotide
  modified_base 28: mod_base = OTHER; note = 2'-O-methyl modified nucleotide
  modified_base 29: mod_base = OTHER; note = 2'-fluoro modified nucleotide
  modified_base 30: mod_base = OTHER; note = 2'-O-methyl modified nucleotide
  modified_base 31: mod_base = OTHER; note = 2'-fluoro modified nucleotide with phosphorothioate linkage
  modified_base 32: mod_base = OTHER; note = 2'-O-methyl modified nucleotide with phosphorothioate linkage
  misc_difference 33: note = 2'-fluoro modified nucleotide may be attached to trivalent N-Acetylgalactosamine

SEQ ID NO: 984 - RNA, 33 nt, synthetic construct
  source 1..33: mol_type = other RNA
  misc_difference 1: note = 2'-O-methyl modified nucleotide with phosphorothioate linkage may be modified with 5'-Phosphate
  modified_base 2: mod_base = OTHER; note = 2'-fluoro modified nucleotide with phosphorothioate linkage
  modified_base 3: mod_base = OTHER; note = 2'-O-methyl modified nucleotide
  modified_base 4: mod_base = OTHER; note = 2'-fluoro modified nucleotide
  modified_base 5: mod_base = OTHER; note = 2'-O-methyl modified nucleotide
  modified_base 6: mod_base = OTHER; note = 2'-fluoro modified nucleotide
  modified_base 7: mod_base = OTHER; note = 2'-O-methyl modified nucleotide
  modified_base 8: mod_base = OTHER; note = 2'-fluoro modified nucleotide
  modified_base 9: mod_base = OTHER; note = 2'-O-methyl modified nucleotide
  modified_base 10: mod_base = OTHER; note = 2'-fluoro modified nucleotide
  modified_base 11: mod_base = OTHER; note = 2'-O-methyl modified nucleotide
  modified_base 12: mod_base = OTHER; note = 2'-fluoro modified nucleotide
  modified_base 13: mod_base = OTHER; note = 2'-O-methyl modified nucleotide
  modified_base 14: mod_base = OTHER; note = 2'-fluoro modified nucleotide with phosphorothioate linkage
  modified_base 15: mod_base = OTHER; note = 2'-O-methyl modified nucleotide with phosphorothioate linkage
  modified_base 16: mod_base = OTHER; note = 2'-fluoro modified nucleotide with phosphorothioate linkage
  modified_base 17: mod_base = OTHER; note = 2'-O-methyl modified nucleotide with phosphorothioate linkage
  modified_base 18: mod_base = OTHER; note = 2'-fluoro modified nucleotide with phosphorothioate linkage
  modified_base 19: mod_base = OTHER; note = 2'-O-methyl modified nucleotide with phosphorothioate linkage
  modified_base 20: mod_base = OTHER; note = 2'-O-methyl modified nucleotide
  modified_base 21: mod_base = OTHER; note = 2'-fluoro modified nucleotide
  modified_base 22: mod_base = OTHER; note = 2'-O-methyl modified nucleotide
  modified_base 23: mod_base = OTHER; note = 2'-fluoro modified nucleotide
  modified_base 24: mod_base = OTHER; note = 2'-O-methyl modified nucleotide
  modified_base 25: mod_base = OTHER; note = 2'-fluoro modified nucleotide
  modified_base 26: mod_base = OTHER; note = 2'-O-methyl modified nucleotide
  modified_base 27: mod_base = OTHER; note = 2'-fluoro modified nucleotide
  modified_base 28: mod_base = OTHER; note = 2'-O-methyl modified nucleotide
  modified_base 29: mod_base = OTHER; note = 2'-fluoro modified nucleotide
  modified_base 30: mod_base = OTHER; note = 2'-O-methyl modified nucleotide
  modified_base 31: mod_base = OTHER; note = 2'-fluoro modified nucleotide with phosphorothioate linkage
  modified_base 32: mod_base = OTHER; note = 2'-O-methyl modified nucleotide with phosphorothioate linkage
  misc_difference 33: note = 2'-fluoro modified nucleotide may be attached to trivalent N-Acetylgalactosamine
tggaagacatctttgaacaaaagatgtcttcca

SEQ ID NO: 985 - RNA, 33 nt, synthetic construct
  source 1..33: mol_type = other RNA
  misc_difference 1: note = 2'-O-methyl modified nucleotide with phosphorothioate linkage may be modified with 5'-Phosphate
  modified_base 2: mod_base = OTHER; note = 2'-fluoro modified nucleotide with phosphorothioate linkage
  modified_base 3: mod_base = OTHER; note = 2'-O-methyl modified nucleotide
  modified_base 4: mod_base = OTHER; note = 2'-fluoro modified nucleotide
  modified_base 5: mod_base = OTHER; note = 2'-O-methyl modified nucleotide
  modified_base 6: mod_base = OTHER; note = 2'-fluoro modified nucleotide
  modified_base 7: mod_base = OTHER; note = 2'-O-methyl modified nucleotide
  modified_base 8: mod_base = OTHER; note = 2'-fluoro modified nucleotide
  modified_base 9: mod_base = OTHER; note = 2'-O-methyl modified nucleotide
  modified_base 10: mod_base = OTHER; note = 2'-fluoro modified nucleotide
  modified_base 11: mod_base = OTHER; note = 2'-O-methyl modified nucleotide
  modified_base 12: mod_base = OTHER; note = 2'-fluoro modified nucleotide
  modified_base 13: mod_base = OTHER; note = 2'-O-methyl modified nucleotide
  modified_base 14: mod_base = OTHER; note = 2'-fluoro modified nucleotide with phosphorothioate linkage
  modified_base 15: mod_base = OTHER; note = 2'-O-methyl modified nucleotide with phosphorothioate linkage
  modified_base 16: mod_base = OTHER; note = 2'-fluoro modified nucleotide with phosphorothioate linkage
  modified_base 17: mod_base = OTHER; note = 2'-O-methyl modified nucleotide with phosphorothioate linkage
  modified_base 18: mod_base = OTHER; note = 2'-fluoro modified nucleotide with phosphorothioate linkage
  modified_base 19: mod_base = OTHER; note = 2'-O-methyl modified nucleotide with phosphorothioate linkage
  modified_base 20: mod_base = OTHER; note = 2'-O-methyl modified nucleotide
  modified_base 21: mod_base = OTHER; note = 2'-fluoro modified nucleotide
  modified_base 22: mod_base = OTHER; note = 2'-O-methyl modified nucleotide
  modified_base 23: mod_base = OTHER; note = 2'-fluoro modified nucleotide
  modified_base 24: mod_base = OTHER; note = 2'-O-methyl modified nucleotide
  modified_base 25: mod_base = OTHER; note = 2'-fluoro modified nucleotide
  modified_base 26: mod_base = OTHER; note = 2'-O-methyl modified nucleotide
  modified_base 27: mod_base = OTHER; note = 2'-fluoro modified nucleotide
  modified_base 28: mod_base = OTHER; note = 2'-O-methyl modified nucleotide
  modified_base 29: mod_base = OTHER; note = 2'-fluoro modified nucleotide
  modified_base 30: mod_base = OTHER; note = 2'-O-methyl modified nucleotide
  modified_base 31: mod_base = OTHER; note = 2'-fluoro modified nucleotide with phosphorothioate linkage
  modified_base 32: mod_base = OTHER; note = 2'-O-methyl modified nucleotide with phosphorothioate linkage
  misc_difference 33: note = 2'-fluoro modified nucleotide may be attached to trivalent N-Acetylgalactosamine
tcagtccttttacactcaatgtaaaaggactga

SEQ ID NO: 986 - RNA, 33 nt, synthetic construct
  source 1..33: mol_type = other RNA
  misc_difference 1: note = 2'-O-methyl modified nucleotide with phosphorothioate linkage may be modified with 5'-Phosphate
  modified_base 2: mod_base = OTHER; note = 2'-fluoro modified nucleotide with phosphorothioate linkage
  modified_base 3: mod_base = OTHER; note = 2'-O-methyl modified nucleotide
  modified_base 4: mod_base = OTHER; note = 2'-fluoro modified nucleotide
  modified_base 5: mod_base = OTHER; note = 2'-O-methyl modified nucleotide
  modified_base 6: mod_base = OTHER; note = 2'-fluoro modified nucleotide
  modified_base 7: mod_base = OTHER; note = 2'-O-methyl modified nucleotide
  modified_base 8: mod_base = OTHER; note = 2'-fluoro modified nucleotide
  modified_base 9: mod_base = OTHER; note = 2'-O-methyl modified nucleotide
  modified_base 10: mod_base = OTHER; note = 2'-fluoro modified nucleotide
  modified_base 11: mod_base = OTHER; note = 2'-O-methyl modified nucleotide
  modified_base 12: mod_base = OTHER; note = 2'-fluoro modified nucleotide
  modified_base 13: mod_base = OTHER; note = 2'-O-methyl modified nucleotide
  modified_base 14: mod_base = OTHER; note = 2'-fluoro modified nucleotide with phosphorothioate linkage
  modified_base 15: mod_base = OTHER; note = 2'-O-methyl modified nucleotide with phosphorothioate linkage
  modified_base 16: mod_base = OTHER; note = 2'-fluoro modified nucleotide with phosphorothioate linkage
  modified_base 17: mod_base = OTHER; note = 2'-O-methyl modified nucleotide with phosphorothioate linkage
  modified_base 18: mod_base = OTHER; note = 2'-fluoro modified nucleotide with phosphorothioate linkage
  modified_base 19: mod_base = OTHER; note = 2'-O-methyl modified nucleotide with phosphorothioate linkage
  modified_base 20: mod_base = OTHER; note = 2'-O-methyl modified nucleotide
  modified_base 21: mod_base = OTHER; note = 2'-fluoro modified nucleotide
  modified_base 22: mod_base = OTHER; note = 2'-O-methyl modified nucleotide
  modified_base 23: mod_base = OTHER; note = 2'-fluoro modified nucleotide
  modified_base 24: mod_base = OTHER; note = 2'-O-methyl modified nucleotide
  modified_base 25: mod_base = OTHER; note = 2'-fluoro modified nucleotide
  modified_base 26: mod_base = OTHER; note = 2'-O-methyl modified nucleotide
  modified_base 27: mod_base = OTHER; note = 2'-fluoro modified nucleotide
  modified_base 28: mod_base = OTHER; note = 2'-O-methyl modified nucleotide
  modified_base 29: mod_base = OTHER; note = 2'-fluoro modified nucleotide
  modified_base 30: mod_base = OTHER; note = 2'-O-methyl modified nucleotide
  modified_base 31: mod_base = OTHER; note = 2'-fluoro modified nucleotide with phosphorothioate linkage
  modified_base 32: mod_base = OTHER; note = 2'-O-methyl modified nucleotide with phosphorothioate linkage
  misc_difference 33: note = 2'-fluoro modified nucleotide may be attached to trivalent N-Acetylgalactosamine
tgttattttgtcaatatatttgacaaaataaca

SEQ ID NO: 987 - RNA, 33 nt, synthetic construct
  source 1..33: mol_type = other RNA
  misc_difference 1: note = 2'-O-methyl modified nucleotide with phosphorothioate linkage may be modified with 5'-Phosphate
  modified_base 2: mod_base = OTHER; note = 2'-fluoro modified nucleotide with phosphorothioate linkage
  modified_base 3: mod_base = OTHER; note = 2'-O-methyl modified nucleotide
  modified_base 4: mod_base = OTHER; note = 2'-fluoro modified nucleotide
  modified_base 5: mod_base = OTHER; note = 2'-O-methyl modified nucleotide
  modified_base 6: mod_base = OTHER; note = 2'-fluoro modified nucleotide
  modified_base 7: mod_base = OTHER; note = 2'-O-methyl modified nucleotide
  modified_base 8: mod_base = OTHER; note = 2'-fluoro modified nucleotide
  modified_base 9: mod_base = OTHER; note = 2'-O-methyl modified nucleotide
  modified_base 10: mod_base = OTHER; note = 2'-fluoro modified nucleotide
  modified_base 11: mod_base = OTHER; note = 2'-O-methyl modified nucleotide
  modified_base 12: mod_base = OTHER; note = 2'-fluoro modified nucleotide
  modified_base 13: mod_base = OTHER; note = 2'-O-methyl modified nucleotide
  modified_base 14: mod_base = OTHER; note = 2'-fluoro modified nucleotide with phosphorothioate linkage
  modified_base 15: mod_base = OTHER; note = 2'-O-methyl modified nucleotide with phosphorothioate linkage
  modified_base 16: mod_base = OTHER; note = 2'-fluoro modified nucleotide with phosphorothioate linkage
  modified_base 17: mod_base = OTHER; note = 2'-O-methyl modified nucleotide with phosphorothioate linkage
  modified_base 18: mod_base = OTHER; note = 2'-fluoro modified nucleotide with phosphorothioate linkage
  modified_base 19: mod_base = OTHER; note = 2'-O-methyl modified nucleotide with phosphorothioate linkage
  modified_base 20: mod_base = OTHER; note = 2'-O-methyl modified nucleotide
  modified_base 21: mod_base = OTHER; note = 2'-fluoro modified nucleotide
  modified_base 22: mod_base = OTHER; note = 2'-O-methyl modified nucleotide
  modified_base 23: mod_base = OTHER; note = 2'-fluoro modified nucleotide
  modified_base 24: mod_base = OTHER; note = 2'-O-methyl modified nucleotide
  modified_base 25: mod_base = OTHER; note = 2'-fluoro modified nucleotide
  modified_base 26: mod_base = OTHER; note = 2'-O-methyl modified nucleotide
  modified_base 27: mod_base = OTHER; note = 2'-fluoro modified nucleotide
  modified_base 28: mod_base = OTHER; note = 2'-O-methyl modified nucleotide
  modified_base 29: mod_base = OTHER; note = 2'-fluoro modified nucleotide
  modified_base 30: mod_base = OTHER; note = 2'-O-methyl modified nucleotide
  modified_base 31: mod_base = OTHER; note = 2'-fluoro modified nucleotide with phosphorothioate linkage
  modified_base 32: mod_base = OTHER; note = 2'-O-methyl modified nucleotide with phosphorothioate linkage
  misc_difference 33: note = 2'-fluoro modified nucleotide may be attached to trivalent N-Acetylgalactosamine
ttacaacagaatatggtatatattctgttgtaa

SEQ ID NO: 988 - RNA, 33 nt, synthetic construct
  source 1..33: mol_type = other RNA
  misc_difference 1: note = 2'-O-methyl modified nucleotide with phosphorothioate linkage may be modified with 5'-Phosphate
  modified_base 2: mod_base = OTHER; note = 2'-fluoro modified nucleotide with phosphorothioate linkage
  modified_base 3: mod_base = OTHER; note = 2'-O-methyl modified nucleotide
  modified_base 4: mod_base = OTHER; note = 2'-fluoro modified nucleotide
  modified_base 5: mod_base = OTHER; note = 2'-O-methyl modified nucleotide
  modified_base 6: mod_base = OTHER; note = 2'-fluoro modified nucleotide
  modified_base 7: mod_base = OTHER; note = 2'-O-methyl modified nucleotide
  modified_base 8: mod_base = OTHER; note = 2'-fluoro modified nucleotide
  modified_base 9: mod_base = OTHER; note = 2'-O-methyl modified nucleotide
  modified_base 10: mod_base = OTHER; note = 2'-fluoro modified nucleotide
  modified_base 11: mod_base = OTHER; note = 2'-O-methyl modified nucleotide
  modified_base 12: mod_base = OTHER; note = 2'-fluoro modified nucleotide
  modified_base 13: mod_base = OTHER; note = 2'-O-methyl modified nucleotide
  modified_base 14: mod_base = OTHER; note = 2'-fluoro modified nucleotide with phosphorothioate linkage
  modified_base 15: mod_base = OTHER; note = 2'-O-methyl modified nucleotide with phosphorothioate linkage
  modified_base 16: mod_base = OTHER; note = 2'-fluoro modified nucleotide with phosphorothioate linkage
  modified_base 17: mod_base = OTHER; note = 2'-O-methyl modified nucleotide with phosphorothioate linkage
  modified_base 18: mod_base = OTHER; note = 2'-fluoro modified nucleotide with phosphorothioate linkage
  modified_base 19: mod_base = OTHER; note = 2'-O-methyl modified nucleotide with phosphorothioate linkage
  modified_base 20: mod_base = OTHER; note = 2'-O-methyl modified nucleotide
  modified_base 21: mod_base = OTHER; note = 2'-fluoro modified nucleotide
  modified_base 22: mod_base = OTHER; note = 2'-O-methyl modified nucleotide
  modified_base 23: mod_base = OTHER; note = 2'-fluoro modified nucleotide
  modified_base 24: mod_base = OTHER; note = 2'-O-methyl modified nucleotide
  modified_base 25: mod_base = OTHER; note = 2'-fluoro modified nucleotide
  modified_base 26: mod_base = OTHER; note = 2'-O-methyl modified nucleotide
  modified_base 27: mod_base = OTHER; note = 2'-fluoro modified nucleotide
  modified_base 28: mod_base = OTHER; note = 2'-O-methyl modified nucleotide
  modified_base 29: mod_base = OTHER; note = 2'-fluoro modified nucleotide
  modified_base 30: mod_base = OTHER; note = 2'-O-methyl modified nucleotide
  modified_base 31: mod_base = OTHER; note = 2'-fluoro modified nucleotide with phosphorothioate linkage
  modified_base 32: mod_base = OTHER; note = 2'-O-methyl modified nucleotide with phosphorothioate linkage
  misc_difference 33: note = 2'-fluoro modified nucleotide may be attached to trivalent N-Acetylgalactosamine
tttattttgtcaatatatgattgacaaaataaa

SEQ ID NO: 989 - RNA, 33 nt, synthetic construct
  source 1..33: mol_type = other RNA
  misc_difference 1: note = 2'-O-methyl modified nucleotide with phosphorothioate linkage may be modified with 5'-Phosphate
  modified_base 2: mod_base = OTHER; note = 2'-fluoro modified nucleotide with phosphorothioate linkage
  modified_base 3: mod_base = OTHER; note = 2'-O-methyl modified nucleotide
  modified_base 4: mod_base = OTHER; note = 2'-fluoro modified nucleotide
  modified_base 5: mod_base = OTHER; note = 2'-O-methyl modified nucleotide
  modified_base 6: mod_base = OTHER; note = 2'-fluoro modified nucleotide
  modified_base 7: mod_base = OTHER; note = 2'-O-methyl modified nucleotide
  modified_base 8: mod_base = OTHER; note = 2'-fluoro modified nucleotide
  modified_base 9: mod_base = OTHER; note = 2'-O-methyl modified nucleotide
  modified_base 10: mod_base = OTHER; note = 2'-fluoro modified nucleotide
  modified_base 11: mod_base = OTHER; note = 2'-O-methyl modified nucleotide
  modified_base 12: mod_base = OTHER; note = 2'-fluoro modified nucleotide
  modified_base 13: mod_base = OTHER; note = 2'-O-methyl modified nucleotide
  modified_base 14: mod_base = OTHER; note = 2'-fluoro modified nucleotide with phosphorothioate linkage
  modified_base 15: mod_base = OTHER; note = 2'-O-methyl modified nucleotide with phosphorothioate linkage
  modified_base 16: mod_base = OTHER; note = 2'-fluoro modified nucleotide with phosphorothioate linkage
  modified_base 17: mod_base = OTHER; note = 2'-O-methyl modified nucleotide with phosphorothioate linkage
  modified_base 18: mod_base = OTHER; note = 2'-fluoro modified nucleotide with phosphorothioate linkage
  modified_base 19: mod_base = OTHER; note = 2'-O-methyl modified nucleotide with phosphorothioate linkage
  modified_base 20: mod_base = OTHER; note = 2'-O-methyl modified nucleotide
  modified_base 21: mod_base = OTHER; note = 2'-fluoro modified nucleotide
  modified_base 22: mod_base = OTHER; note = 2'-O-methyl modified nucleotide
  modified_base 23: mod_base = OTHER; note = 2'-fluoro modified nucleotide
  modified_base 24: mod_base = OTHER; note = 2'-O-methyl modified nucleotide
  modified_base 25: mod_base = OTHER; note = 2'-fluoro modified nucleotide
  modified_base 26: mod_base = OTHER; note = 2'-O-methyl modified nucleotide
  modified_base 27: mod_base = OTHER; note = 2'-fluoro modified nucleotide
  modified_base 28: mod_base = OTHER; note = 2'-O-methyl modified nucleotide
  modified_base 29: mod_base = OTHER; note = 2'-fluoro modified nucleotide
  modified_base 30: mod_base = OTHER; note = 2'-O-methyl modified nucleotide
  modified_base 31: mod_base = OTHER; note = 2'-fluoro modified nucleotide with phosphorothioate linkage
  modified_base 32: mod_base = OTHER; note = 2'-O-methyl modified nucleotide with phosphorothioate linkage
  misc_difference 33: note = 2'-fluoro modified nucleotide may be attached to trivalent N-Acetylgalactosamine
taggcttcaggaaaagaggtttcctgaagccta

SEQ ID NO: 990 - RNA, 33 nt, synthetic construct
  source 1..33: mol_type = other RNA
  misc_difference 1: note = 2'-O-methyl modified nucleotide with phosphorothioate linkage may be modified with 5'-Phosphate
  modified_base 2: mod_base = OTHER; note = 2'-fluoro modified nucleotide with phosphorothioate linkage
  modified_base 3: mod_base = OTHER; note = 2'-O-methyl modified nucleotide
  modified_base 4: mod_base = OTHER; note = 2'-fluoro modified nucleotide
  modified_base 5: mod_base = OTHER; note = 2'-O-methyl modified nucleotide
  modified_base 6: mod_base = OTHER; note = 2'-fluoro modified nucleotide
  modified_base 7: mod_base = OTHER; note = 2'-O-methyl modified nucleotide
  modified_base 8: mod_base = OTHER; note = 2'-fluoro modified nucleotide
  modified_base 9: mod_base = OTHER; note = 2'-O-methyl modified nucleotide
  modified_base 10: mod_base = OTHER; note = 2'-fluoro modified nucleotide
  modified_base 11: mod_base = OTHER; note = 2'-O-methyl modified nucleotide
  modified_base 12: mod_base = OTHER; note = 2'-fluoro modified nucleotide
  modified_base 13: mod_base = OTHER; note = 2'-O-methyl modified nucleotide
  modified_base 14: mod_base = OTHER; note = 2'-fluoro modified nucleotide with phosphorothioate linkage
  modified_base 15: mod_base = OTHER; note = 2'-O-methyl modified nucleotide with phosphorothioate linkage
  modified_base 16: mod_base = OTHER; note = 2'-fluoro modified nucleotide with phosphorothioate linkage
  modified_base 17: mod_base = OTHER; note = 2'-O-methyl modified nucleotide with phosphorothioate linkage
  modified_base 18: mod_base = OTHER; note = 2'-fluoro modified nucleotide with phosphorothioate linkage
  modified_base 19: mod_base = OTHER; note = 2'-O-methyl modified nucleotide with phosphorothioate linkage
  modified_base 20: mod_base = OTHER; note = 2'-O-methyl modified nucleotide
  modified_base 21: mod_base = OTHER; note = 2'-fluoro modified nucleotide
  modified_base 22: mod_base = OTHER; note = 2'-O-methyl modified nucleotide
  modified_base 23: mod_base = OTHER; note = 2'-fluoro modified nucleotide
  modified_base 24: mod_base = OTHER; note = 2'-O-methyl modified nucleotide
  modified_base 25: mod_base = OTHER; note = 2'-fluoro modified nucleotide
  modified_base 26: mod_base = OTHER; note = 2'-O-methyl modified nucleotide
  modified_base 27: mod_base = OTHER; note = 2'-fluoro modified nucleotide
  modified_base 28: mod_base = OTHER; note = 2'-O-methyl modified nucleotide
  modified_base 29: mod_base = OTHER; note = 2'-fluoro modified nucleotide
  modified_base 30: mod_base = OTHER; note = 2'-O-methyl modified nucleotide
  modified_base 31: mod_base = OTHER; note = 2'-fluoro modified nucleotide with phosphorothioate linkage
  modified_base 32: mod_base = OTHER; note = 2'-O-methyl modified nucleotide with phosphorothioate linkage
  misc_difference 33: note = 2'-fluoro modified nucleotide may be attached to trivalent N-Acetylgalactosamine
tggaaaagagataattccattatctcttttcca

SEQ ID NO: 991 - RNA, 33 nt, synthetic construct; identical to SEQ ID NO: 541
  source 1..33: mol_type = other RNA
  misc_difference 1: note = 2'-O-methyl modified nucleotide with phosphorothioate linkage may be modified with 5'-Phosphate
  modified_base 2: mod_base = OTHER; note = 2'-fluoro modified nucleotide with phosphorothioate linkage
  modified_base 3: mod_base = OTHER; note = 2'-O-methyl modified nucleotide
  modified_base 4: mod_base = OTHER; note = 2'-fluoro modified nucleotide
  modified_base 5: mod_base = OTHER; note = 2'-O-methyl modified nucleotide
  modified_base 6: mod_base = OTHER; note = 2'-fluoro modified nucleotide
  modified_base 7: mod_base = OTHER; note = 2'-O-methyl modified nucleotide
  modified_base 8: mod_base = OTHER; note = 2'-fluoro modified nucleotide
  modified_base 9: mod_base = OTHER; note = 2'-O-methyl modified nucleotide
  modified_base 10: mod_base = OTHER; note = 2'-fluoro modified nucleotide
  modified_base 11: mod_base = OTHER; note = 2'-O-methyl modified nucleotide
  modified_base 12: mod_base = OTHER; note = 2'-fluoro modified nucleotide
  modified_base 13: mod_base = OTHER; note = 2'-O-methyl modified nucleotide
  modified_base 14: mod_base = OTHER; note = 2'-fluoro modified nucleotide with phosphorothioate linkage
  modified_base 15: mod_base = OTHER; note = 2'-O-methyl modified nucleotide with phosphorothioate linkage
  modified_base 16: mod_base = OTHER; note = 2'-fluoro modified nucleotide with phosphorothioate linkage
  modified_base 17: mod_base = OTHER; note = 2'-O-methyl modified nucleotide with phosphorothioate linkage
  modified_base 18: mod_base = OTHER; note = 2'-fluoro modified nucleotide with phosphorothioate linkage
  modified_base 19: mod_base = OTHER; note = 2'-O-methyl modified nucleotide with phosphorothioate linkage
  modified_base 20: mod_base = OTHER; note = 2'-O-methyl modified nucleotide
  modified_base 21: mod_base = OTHER; note = 2'-fluoro modified nucleotide
  modified_base 22: mod_base = OTHER; note = 2'-O-methyl modified nucleotide
  modified_base 23: mod_base = OTHER; note = 2'-fluoro modified nucleotide
  modified_base 24: mod_base = OTHER; note = 2'-O-methyl modified nucleotide
  modified_base 25: mod_base = OTHER; note = 2'-fluoro modified nucleotide
  modified_base 26: mod_base = OTHER; note = 2'-O-methyl modified nucleotide
  modified_base 27: mod_base = OTHER; note = 2'-fluoro modified nucleotide
  modified_base 28: mod_base = OTHER; note = 2'-O-methyl modified nucleotide
  modified_base 29: mod_base = OTHER; note = 2'-fluoro modified nucleotide
  modified_base 30: mod_base = OTHER; note = 2'-O-methyl modified nucleotide
  modified_base 31: mod_base = OTHER; note = 2'-fluoro modified nucleotide with phosphorothioate linkage
  modified_base 32: mod_base = OTHER; note = 2'-O-methyl modified nucleotide with phosphorothioate linkage
  misc_difference 33: note = 2'-fluoro modified nucleotide may be attached to trivalent N-Acetylgalactosamine

SEQ ID NO: 992 - RNA, 33 nt, synthetic construct; identical to SEQ ID NO: 542
  source 1..33: mol_type = other RNA
  misc_difference 1: note = 2'-O-methyl modified nucleotide with phosphorothioate linkage may be modified with 5'-Phosphate
  modified_base 2: mod_base = OTHER; note = 2'-fluoro modified nucleotide with phosphorothioate linkage
  modified_base 3: mod_base = OTHER; note = 2'-O-methyl modified nucleotide
  modified_base 4: mod_base = OTHER; note = 2'-fluoro modified nucleotide
  modified_base 5: mod_base = OTHER; note = 2'-O-methyl modified nucleotide
  modified_base 6: mod_base = OTHER; note = 2'-fluoro modified nucleotide
  modified_base 7: mod_base = OTHER; note = 2'-O-methyl modified nucleotide
  modified_base 8: mod_base = OTHER; note = 2'-fluoro modified nucleotide
  modified_base 9: mod_base = OTHER; note = 2'-O-methyl modified nucleotide
  modified_base 10: mod_base = OTHER; note = 2'-fluoro modified nucleotide
  modified_base 11: mod_base = OTHER; note = 2'-O-methyl modified nucleotide
  modified_base 12: mod_base = OTHER; note = 2'-fluoro modified nucleotide
  modified_base 13: mod_base = OTHER; note = 2'-O-methyl modified nucleotide
  modified_base 14: mod_base = OTHER; note = 2'-fluoro modified nucleotide with phosphorothioate linkage
  modified_base 15: mod_base = OTHER; note = 2'-O-methyl modified nucleotide with phosphorothioate linkage
  modified_base 16: mod_base = OTHER; note = 2'-fluoro modified nucleotide with phosphorothioate linkage
  modified_base 17: mod_base = OTHER; note = 2'-O-methyl modified nucleotide with phosphorothioate linkage
  modified_base 18: mod_base = OTHER; note = 2'-fluoro modified nucleotide with phosphorothioate linkage
  modified_base 19: mod_base = OTHER; note = 2'-O-methyl modified nucleotide with phosphorothioate linkage
  modified_base 20: mod_base = OTHER; note = 2'-O-methyl modified nucleotide
  modified_base 21: mod_base = OTHER; note = 2'-fluoro modified nucleotide
  modified_base 22: mod_base = OTHER; note = 2'-O-methyl modified nucleotide
  modified_base 23: mod_base = OTHER; note = 2'-fluoro modified nucleotide
  modified_base 24: mod_base = OTHER; note = 2'-O-methyl modified nucleotide
  modified_base 25: mod_base = OTHER; note = 2'-fluoro modified nucleotide
  modified_base 26: mod_base = OTHER; note = 2'-O-methyl modified nucleotide
  modified_base 27: mod_base = OTHER; note = 2'-fluoro modified nucleotide
  modified_base 28: mod_base = OTHER; note = 2'-O-methyl modified nucleotide
  modified_base 29: mod_base = OTHER; note = 2'-fluoro modified nucleotide
  modified_base 30: mod_base = OTHER; note = 2'-O-methyl modified nucleotide
  modified_base 31: mod_base = OTHER; note = 2'-fluoro modified nucleotide with phosphorothioate linkage
  modified_base 32: mod_base = OTHER; note = 2'-O-methyl modified nucleotide with phosphorothioate linkage
  misc_difference 33: note = 2'-fluoro modified nucleotide may be attached to trivalent N-Acetylgalactosamine

SEQ ID NO: 993 - RNA, 33 nt, synthetic construct
  source 1..33: mol_type = other RNA
  misc_difference 1: note = 2'-O-methyl modified nucleotide with phosphorothioate linkage may be modified with 5'-Phosphate
  modified_base 2: mod_base = OTHER; note = 2'-fluoro modified nucleotide with phosphorothioate linkage
  modified_base 3: mod_base = OTHER; note = 2'-O-methyl modified nucleotide
  modified_base 4: mod_base = OTHER; note = 2'-fluoro modified nucleotide
  modified_base 5: mod_base = OTHER; note = 2'-O-methyl modified nucleotide
  modified_base 6: mod_base = OTHER; note = 2'-fluoro modified nucleotide
  modified_base 7: mod_base = OTHER; note = 2'-O-methyl modified nucleotide
  modified_base 8: mod_base = OTHER; note = 2'-fluoro modified nucleotide
  modified_base 9: mod_base = OTHER; note = 2'-O-methyl modified nucleotide
  modified_base 10: mod_base = OTHER; note = 2'-fluoro modified nucleotide
  modified_base 11: mod_base = OTHER; note = 2'-O-methyl modified nucleotide
  modified_base 12: mod_base = OTHER; note = 2'-fluoro modified nucleotide
  modified_base 13: mod_base = OTHER; note = 2'-O-methyl modified nucleotide
  modified_base 14: mod_base = OTHER; note = 2'-fluoro modified nucleotide with phosphorothioate linkage
  modified_base 15: mod_base = OTHER; note = 2'-O-methyl modified nucleotide with phosphorothioate linkage
  modified_base 16: mod_base = OTHER; note = 2'-fluoro modified nucleotide with phosphorothioate linkage
  modified_base 17: mod_base = OTHER; note = 2'-O-methyl modified nucleotide with phosphorothioate linkage
  modified_base 18: mod_base = OTHER; note = 2'-fluoro modified nucleotide with phosphorothioate linkage
  modified_base 19: mod_base = OTHER; note = 2'-O-methyl modified nucleotide with phosphorothioate linkage
  modified_base 20: mod_base = OTHER; note = 2'-O-methyl modified nucleotide
  modified_base 21: mod_base = OTHER; note = 2'-fluoro modified nucleotide
  modified_base 22: mod_base = OTHER; note = 2'-O-methyl modified nucleotide
  modified_base 23: mod_base = OTHER; note = 2'-fluoro modified nucleotide
  modified_base 24: mod_base = OTHER; note = 2'-O-methyl modified nucleotide
  modified_base 25: mod_base = OTHER; note = 2'-fluoro modified nucleotide
  modified_base 26: mod_base = OTHER; note = 2'-O-methyl modified nucleotide
  modified_base 27: mod_base = OTHER; note = 2'-fluoro modified nucleotide
  modified_base 28: mod_base = OTHER; note = 2'-O-methyl modified nucleotide
  modified_base 29: mod_base = OTHER; note = 2'-fluoro modified nucleotide
  modified_base 30: mod_base = OTHER; note = 2'-O-methyl modified nucleotide
  modified_base 31: mod_base = OTHER; note = 2'-fluoro modified nucleotide with phosphorothioate linkage
  modified_base 32: mod_base = OTHER; note = 2'-O-methyl modified nucleotide with phosphorothioate linkage
  misc_difference 33: note = 2'-fluoro modified nucleotide may be attached to trivalent N-Acetylgalactosamine
tatattctttaacttcaaaagttaaagaatata

SEQ ID NO: 994 - RNA, 33 nt, synthetic construct
  source 1..33: mol_type = other RNA
  misc_difference 1: note = 2'-O-methyl modified nucleotide with phosphorothioate linkage may be modified with 5'-Phosphate
  modified_base 2: mod_base = OTHER; note = 2'-fluoro modified nucleotide with phosphorothioate linkage
  modified_base 3: mod_base = OTHER; note = 2'-O-methyl modified nucleotide
  modified_base 4: mod_base = OTHER; note = 2'-fluoro modified nucleotide
  modified_base 5: mod_base = OTHER; note = 2'-O-methyl modified nucleotide
  modified_base 6: mod_base = OTHER; note = 2'-fluoro modified nucleotide
  modified_base 7: mod_base = OTHER; note = 2'-O-methyl modified nucleotide
  modified_base 8: mod_base = OTHER; note = 2'-fluoro modified nucleotide
  modified_base 9: mod_base = OTHER; note = 2'-O-methyl modified nucleotide
  modified_base 10: mod_base = OTHER; note = 2'-fluoro modified nucleotide
  modified_base 11: mod_base = OTHER; note = 2'-O-methyl modified nucleotide
  modified_base 12: mod_base = OTHER; note = 2'-fluoro modified nucleotide
  modified_base 13: mod_base = OTHER; note = 2'-O-methyl modified nucleotide
  modified_base 14: mod_base = OTHER; note = 2'-fluoro modified nucleotide with phosphorothioate linkage
  modified_base 15: mod_base = OTHER; note = 2'-O-methyl modified nucleotide with phosphorothioate linkage
  modified_base 16: mod_base = OTHER; note = 2'-fluoro modified nucleotide with phosphorothioate linkage
  modified_base 17: mod_base = OTHER; note = 2'-O-methyl modified nucleotide with phosphorothioate linkage
  modified_base 18: mod_base = OTHER; note = 2'-fluoro modified nucleotide with phosphorothioate linkage
  modified_base 19: mod_base = OTHER; note = 2'-O-methyl modified nucleotide with phosphorothioate linkage
  modified_base 20: mod_base = OTHER; note = 2'-O-methyl modified nucleotide
  modified_base 21: mod_base = OTHER; note = 2'-fluoro modified nucleotide
  modified_base 22: mod_base = OTHER; note = 2'-O-methyl modified nucleotide
  modified_base 23: mod_base = OTHER; note = 2'-fluoro modified nucleotide
  modified_base 24: mod_base = OTHER; note = 2'-O-methyl modified nucleotide
  modified_base 25: mod_base = OTHER; note = 2'-fluoro modified nucleotide
  modified_base 26: mod_base = OTHER; note = 2'-O-methyl modified nucleotide
  modified_base 27: mod_base = OTHER; note = 2'-fluoro modified nucleotide
  modified_base 28: mod_base = OTHER; note = 2'-O-methyl modified nucleotide
  modified_base 29: mod_base = OTHER; note = 2'-fluoro modified nucleotide
  modified_base 30: mod_base = OTHER; note = 2'-O-methyl modified nucleotide
  modified_base 31: mod_base = OTHER; note = 2'-fluoro modified nucleotide with phosphorothioate linkage
  modified_base 32: mod_base = OTHER; note = 2'-O-methyl modified nucleotide with phosphorothioate linkage
  misc_difference 33: note = 2'-fluoro modified nucleotide may be attached to trivalent N-Acetylgalactosamine
tagacatctttgaacacctttcaaagatgtcta

SEQ ID NO: 995 - RNA, 33 nt, synthetic construct
  source 1..33: mol_type = other RNA
  misc_difference 1: note = 2'-O-methyl modified nucleotide with phosphorothioate linkage may be modified with 5'-Phosphate
  modified_base 2: mod_base = OTHER; note = 2'-fluoro modified nucleotide with phosphorothioate linkage
  modified_base 3: mod_base = OTHER; note = 2'-O-methyl modified nucleotide
  modified_base 4: mod_base = OTHER; note = 2'-fluoro modified nucleotide
  modified_base 5: mod_base = OTHER; note = 2'-O-methyl modified nucleotide
  modified_base 6: mod_base = OTHER; note = 2'-fluoro modified nucleotide
  modified_base 7: mod_base = OTHER; note = 2'-O-methyl modified nucleotide
  modified_base 8: mod_base = OTHER; note = 2'-fluoro modified nucleotide
  modified_base 9: mod_base = OTHER; note = 2'-O-methyl modified nucleotide
  modified_base 10: mod_base = OTHER; note = 2'-fluoro modified nucleotide
  modified_base 11: mod_base = OTHER; note = 2'-O-methyl modified nucleotide
  modified_base 12: mod_base = OTHER; note = 2'-fluoro modified nucleotide
  modified_base 13: mod_base = OTHER; note = 2'-O-methyl modified nucleotide
  modified_base 14: mod_base = OTHER; note = 2'-fluoro modified nucleotide with phosphorothioate linkage
  modified_base 15: mod_base = OTHER; note = 2'-O-methyl modified nucleotide with phosphorothioate linkage
  modified_base 16: mod_base = OTHER; note = 2'-fluoro modified nucleotide with phosphorothioate linkage
  modified_base 17: mod_base = OTHER; note = 2'-O-methyl modified nucleotide with phosphorothioate linkage
  modified_base 18: mod_base = OTHER; note = 2'-fluoro modified nucleotide with phosphorothioate linkage
  modified_base 19: mod_base = OTHER; note = 2'-O-methyl modified nucleotide with phosphorothioate linkage
  modified_base 20: mod_base = OTHER; note = 2'-O-methyl modified nucleotide
  modified_base 21: mod_base = OTHER; note = 2'-fluoro modified nucleotide
  modified_base 22: mod_base = OTHER; note = 2'-O-methyl modified nucleotide
  modified_base 23: mod_base = OTHER; note = 2'-fluoro modified nucleotide
  modified_base 24: mod_base = OTHER; note = 2'-O-methyl modified nucleotide
  modified_base 25: mod_base = OTHER; note = 2'-fluoro modified nucleotide
  modified_base 26: mod_base = OTHER; note = 2'-O-methyl modified nucleotide
  modified_base 27: mod_base = OTHER; note = 2'-fluoro modified nucleotide
  modified_base 28: mod_base = OTHER; note = 2'-O-methyl modified nucleotide
  modified_base 29: mod_base = OTHER; note = 2'-fluoro modified nucleotide
  modified_base 30: mod_base = OTHER; note = 2'-O-methyl modified nucleotide
  modified_base 31: mod_base = OTHER; note = 2'-fluoro modified nucleotide with phosphorothioate linkage
  modified_base 32: mod_base = OTHER; note = 2'-O-methyl modified nucleotide with phosphorothioate linkage
  misc_difference 33: note = 2'-fluoro modified nucleotide may be attached to trivalent N-Acetylgalactosamine
tcaggaagacatctttgaaagatgtcttcctga

SEQ ID NO: 996 - RNA, 33 nt, synthetic construct; identical to SEQ ID NO: 546
  source 1..33: mol_type = other RNA
  misc_difference 1: note = 2'-O-methyl modified nucleotide with phosphorothioate linkage may be modified with 5'-Phosphate
  modified_base 2: mod_base = OTHER; note = 2'-fluoro modified nucleotide with phosphorothioate linkage
  modified_base 3: mod_base = OTHER; note = 2'-O-methyl modified nucleotide
  modified_base 4: mod_base = OTHER; note = 2'-fluoro modified nucleotide
  modified_base 5: mod_base = OTHER; note = 2'-O-methyl modified nucleotide
  modified_base 6: mod_base = OTHER; note = 2'-fluoro modified nucleotide
  modified_base 7: mod_base = OTHER; note = 2'-O-methyl modified nucleotide
  modified_base 8: mod_base = OTHER; note = 2'-fluoro modified nucleotide
  modified_base 9: mod_base = OTHER; note = 2'-O-methyl modified nucleotide
  modified_base 10: mod_base = OTHER; note = 2'-fluoro modified nucleotide
  modified_base 11: mod_base = OTHER; note = 2'-O-methyl modified nucleotide
  modified_base 12: mod_base = OTHER; note = 2'-fluoro modified nucleotide
  modified_base 13: mod_base = OTHER; note = 2'-O-methyl modified nucleotide
  modified_base 14: mod_base = OTHER; note = 2'-fluoro modified nucleotide with phosphorothioate linkage
  modified_base 15: mod_base = OTHER; note = 2'-O-methyl modified nucleotide with phosphorothioate linkage
  modified_base 16: mod_base = OTHER; note = 2'-fluoro modified nucleotide with phosphorothioate linkage
  modified_base 17: mod_base = OTHER; note = 2'-O-methyl modified nucleotide with phosphorothioate linkage
  modified_base 18: mod_base = OTHER; note = 2'-fluoro modified nucleotide with phosphorothioate linkage
  modified_base 19: mod_base = OTHER; note = 2'-O-methyl modified nucleotide with phosphorothioate linkage
  modified_base 20: mod_base = OTHER; note = 2'-O-methyl modified nucleotide
  modified_base 21: mod_base = OTHER; note = 2'-fluoro modified nucleotide
  modified_base 22: mod_base = OTHER; note = 2'-O-methyl modified nucleotide
  modified_base 23: mod_base = OTHER; note = 2'-fluoro modified nucleotide
  modified_base 24: mod_base = OTHER; note = 2'-O-methyl modified nucleotide
  modified_base 25: mod_base = OTHER; note = 2'-fluoro modified nucleotide
  modified_base 26: mod_base = OTHER; note = 2'-O-methyl modified nucleotide
  modified_base 27: mod_base = OTHER; note = 2'-fluoro modified nucleotide
  modified_base 28: mod_base = OTHER; note = 2'-O-methyl modified nucleotide
  modified_base 29: mod_base = OTHER; note = 2'-fluoro modified nucleotide
  modified_base 30: mod_base = OTHER; note = 2'-O-methyl modified nucleotide
  modified_base 31: mod_base = OTHER; note = 2'-fluoro modified nucleotide with phosphorothioate linkage
  modified_base 32: mod_base = OTHER; note = 2'-O-methyl modified nucleotide with phosphorothioate linkage
  misc_difference 33: note = 2'-fluoro modified nucleotide may be attached to trivalent N-Acetylgalactosamine

SEQ ID NO: 997 - RNA, 33 nt, synthetic construct
  source 1..33: mol_type = other RNA
  misc_difference 1: note = 2'-O-methyl modified nucleotide with phosphorothioate linkage may be modified with 5'-Phosphate
  modified_base 2: mod_base = OTHER; note = 2'-fluoro modified nucleotide with phosphorothioate linkage
  modified_base 3: mod_base = OTHER; note = 2'-O-methyl modified nucleotide
  modified_base 4: mod_base = OTHER; note = 2'-fluoro modified nucleotide
  modified_base 5: mod_base = OTHER; note = 2'-O-methyl modified nucleotide
  modified_base 6: mod_base = OTHER; note = 2'-fluoro modified nucleotide
  modified_base 7: mod_base = OTHER; note = 2'-O-methyl modified nucleotide
  modified_base 8: mod_base = OTHER; note = 2'-fluoro modified nucleotide
  modified_base 9: mod_base = OTHER; note = 2'-O-methyl modified nucleotide
  modified_base 10: mod_base = OTHER; note = 2'-fluoro modified nucleotide
  modified_base 11: mod_base = OTHER; note = 2'-O-methyl modified nucleotide
  modified_base 12: mod_base = OTHER; note = 2'-fluoro modified nucleotide
  modified_base 13: mod_base = OTHER; note = 2'-O-methyl modified nucleotide
  modified_base 14: mod_base = OTHER; note = 2'-fluoro modified nucleotide with phosphorothioate linkage
  modified_base 15: mod_base = OTHER; note = 2'-O-methyl modified nucleotide with phosphorothioate linkage
  modified_base 16: mod_base = OTHER; note = 2'-fluoro modified nucleotide with phosphorothioate linkage
  modified_base 17: mod_base = OTHER; note = 2'-O-methyl modified nucleotide with phosphorothioate linkage
  modified_base 18: mod_base = OTHER; note = 2'-fluoro modified nucleotide with phosphorothioate linkage
  modified_base 19: mod_base = OTHER; note = 2'-O-methyl modified nucleotide with phosphorothioate linkage
  modified_base 20: mod_base = OTHER; note = 2'-O-methyl modified nucleotide
  modified_base 21: mod_base = OTHER; note = 2'-fluoro modified nucleotide
  modified_base 22: mod_base = OTHER; note = 2'-O-methyl modified nucleotide
  modified_base 23: mod_base = OTHER; note = 2'-fluoro modified nucleotide
  modified_base 24: mod_base = OTHER; note = 2'-O-methyl modified nucleotide
  modified_base 25: mod_base = OTHER; note = 2'-fluoro modified nucleotide
  modified_base 26: mod_base = OTHER; note = 2'-O-methyl modified nucleotide
  modified_base 27: mod_base = OTHER; note = 2'-fluoro modified nucleotide
  modified_base 28: mod_base = OTHER; note = 2'-O-methyl modified nucleotide
  modified_base 29: mod_base = OTHER; note = 2'-fluoro modified nucleotide
  modified_base 30: mod_base = OTHER; note = 2'-O-methyl modified nucleotide
  modified_base 31: mod_base = OTHER; note = 2'-fluoro modified nucleotide with phosphorothioate linkage
  modified_base 32: mod_base = OTHER; note = 2'-O-methyl modified nucleotide with phosphorothioate linkage
  misc_difference 33: note = 2'-fluoro modified nucleotide may be attached to trivalent N-Acetylgalactosamine
tattgtcataggttattggaacctatgacaata

SEQ ID NO: 998 - RNA, 33 nt, synthetic construct; identical to SEQ ID NO: 548
  source 1..33: mol_type = other RNA
  misc_difference 1: note = 2'-O-methyl modified nucleotide with phosphorothioate linkage may be modified with 5'-Phosphate
  modified_base 2: mod_base = OTHER; note = 2'-fluoro modified nucleotide with phosphorothioate linkage
  modified_base 3: mod_base = OTHER; note = 2'-O-methyl modified nucleotide
  modified_base 4: mod_base = OTHER; note = 2'-fluoro modified nucleotide
  modified_base 5: mod_base = OTHER; note = 2'-O-methyl modified nucleotide
  modified_base 6: mod_base = OTHER; note = 2'-fluoro modified nucleotide
  modified_base 7: mod_base = OTHER; note = 2'-O-methyl modified nucleotide
  modified_base 8: mod_base = OTHER; note = 2'-fluoro modified nucleotide
  modified_base 9: mod_base = OTHER; note = 2'-O-methyl modified nucleotide
  modified_base 10: mod_base = OTHER; note = 2'-fluoro modified nucleotide
  modified_base 11: mod_base = OTHER; note = 2'-O-methyl modified nucleotide
  modified_base 12: mod_base = OTHER; note = 2'-fluoro modified nucleotide
  modified_base 13: mod_base = OTHER; note = 2'-O-methyl modified nucleotide
  modified_base 14: mod_base = OTHER; note = 2'-fluoro modified nucleotide with phosphorothioate linkage
  modified_base 15: mod_base = OTHER; note = 2'-O-methyl modified nucleotide with phosphorothioate linkage
  modified_base 16: mod_base = OTHER; note = 2'-fluoro modified nucleotide with phosphorothioate linkage
  modified_base 17: mod_base = OTHER; note = 2'-O-methyl modified nucleotide with phosphorothioate linkage
  modified_base 18: mod_base = OTHER; note = 2'-fluoro modified nucleotide with phosphorothioate linkage
  modified_base 19: mod_base = OTHER; note = 2'-O-methyl modified nucleotide with phosphorothioate linkage
  modified_base 20: mod_base = OTHER; note = 2'-O-methyl modified nucleotide
  modified_base 21: mod_base = OTHER; note = 2'-fluoro modified nucleotide
  modified_base 22: mod_base = OTHER; note = 2'-O-methyl modified nucleotide
  modified_base 23: mod_base = OTHER; note = 2'-fluoro modified nucleotide
  modified_base 24: mod_base = OTHER; note = 2'-O-methyl modified nucleotide
  modified_base 25: mod_base = OTHER; note = 2'-fluoro modified nucleotide
  modified_base 26: mod_base = OTHER; note = 2'-O-methyl modified nucleotide
  modified_base 27: mod_base = OTHER; note = 2'-fluoro modified nucleotide
  modified_base 28: mod_base = OTHER; note = 2'-O-methyl modified nucleotide
  modified_base 29: mod_base = OTHER; note = 2'-fluoro modified nucleotide
  modified_base 30: mod_base = OTHER; note = 2'-O-methyl modified nucleotide
  modified_base 31: mod_base = OTHER; note = 2'-fluoro modified nucleotide with phosphorothioate linkage
  modified_base 32: mod_base = OTHER; note = 2'-O-methyl modified nucleotide with phosphorothioate linkage
  misc_difference 33: note = 2'-fluoro modified nucleotide may be attached to trivalent N-Acetylgalactosamine

SEQ ID NO: 999 - RNA, 33 nt, synthetic construct
  source 1..33: mol_type = other RNA
  misc_difference 1: note = 2'-O-methyl modified nucleotide with phosphorothioate linkage may be modified with 5'-Phosphate
  modified_base 2: mod_base = OTHER; note = 2'-fluoro modified nucleotide with phosphorothioate linkage
  modified_base 3: mod_base = OTHER; note = 2'-O-methyl modified nucleotide
  modified_base 4: mod_base = OTHER; note = 2'-fluoro modified nucleotide
  modified_base 5: mod_base = OTHER; note = 2'-O-methyl modified nucleotide
  modified_base 6: mod_base = OTHER; note = 2'-fluoro modified nucleotide
  modified_base 7: mod_base = OTHER; note = 2'-O-methyl modified nucleotide
  modified_base 8: mod_base = OTHER; note = 2'-fluoro modified nucleotide
  modified_base 9: mod_base = OTHER; note = 2'-O-methyl modified nucleotide
  modified_base 10: mod_base = OTHER; note = 2'-fluoro modified nucleotide
  modified_base 11: mod_base = OTHER; note = 2'-O-methyl modified nucleotide
  modified_base 12: mod_base = OTHER; note = 2'-fluoro modified nucleotide
  modified_base 13: mod_base = OTHER; note = 2'-O-methyl modified nucleotide
  modified_base 14: mod_base = OTHER; note = 2'-fluoro modified nucleotide with phosphorothioate linkage
  modified_base 15: mod_base = OTHER; note = 2'-O-methyl modified nucleotide with phosphorothioate linkage
  modified_base 16: mod_base = OTHER; note = 2'-fluoro modified nucleotide with phosphorothioate linkage
  modified_base 17: mod_base = OTHER; note = 2'-O-methyl modified nucleotide with phosphorothioate linkage
  modified_base 18: mod_base = OTHER; note = 2'-fluoro modified nucleotide with phosphorothioate linkage
  modified_base 19: mod_base = OTHER; note = 2'-O-methyl modified nucleotide with phosphorothioate linkage
  modified_base 20: mod_base = OTHER; note = 2'-O-methyl modified nucleotide
  modified_base 21: mod_base = OTHER; note = 2'-fluoro modified nucleotide
  modified_base 22: mod_base = OTHER; note = 2'-O-methyl modified nucleotide
  modified_base 23: mod_base = OTHER; note = 2'-fluoro modified nucleotide
  modified_base 24: mod_base = OTHER; note = 2'-O-methyl modified nucleotide
  modified_base 25: mod_base = OTHER; note = 2'-fluoro modified nucleotide
  modified_base 26: mod_base = OTHER; note = 2'-O-methyl modified nucleotide
  modified_base 27: mod_base = OTHER; note = 2'-fluoro modified nucleotide
  modified_base 28: mod_base = OTHER; note = 2'-O-methyl modified nucleotide
  modified_base 29: mod_base = OTHER; note = 2'-fluoro modified nucleotide
  modified_base 30: mod_base = OTHER; note = 2'-O-methyl modified nucleotide
  modified_base 31: mod_base = OTHER; note = 2'-fluoro modified nucleotide with phosphorothioate linkage
  modified_base 32: mod_base = OTHER; note = 2'-O-methyl modified nucleotide with phosphorothioate linkage
  misc_difference 33: note = 2'-fluoro modified nucleotide may be attached to trivalent N-Acetylgalactosamine
tgtgagttattttgtcaatcaaaataactcaca

SEQ ID NO: 1000 - RNA, 33 nt, synthetic construct
  source 1..33: mol_type = other RNA
  misc_difference 1: note = 2'-O-methyl modified nucleotide with phosphorothioate linkage may be modified with 5'-Phosphate
  modified_base 2: mod_base = OTHER; note = 2'-fluoro modified nucleotide with phosphorothioate linkage
  modified_base 3: mod_base = OTHER; note = 2'-O-methyl modified nucleotide
  modified_base 4: mod_base = OTHER; note = 2'-fluoro modified nucleotide
  modified_base 5: mod_base = OTHER; note = 2'-O-methyl modified nucleotide
  modified_base 6: mod_base = OTHER; note = 2'-fluoro modified nucleotide
  modified_base 7: mod_base = OTHER; note = 2'-O-methyl modified nucleotide
  modified_base 8: mod_base = OTHER; note = 2'-fluoro modified nucleotide
  modified_base 9: mod_base = OTHER; note = 2'-O-methyl modified nucleotide
  modified_base 10: mod_base = OTHER; note = 2'-fluoro modified nucleotide
  modified_base 11: mod_base = OTHER; note = 2'-O-methyl modified nucleotide
  modified_base 12: mod_base = OTHER; note = 2'-fluoro modified nucleotide
  modified_base 13: mod_base = OTHER; note = 2'-O-methyl modified nucleotide
  modified_base 14: mod_base = OTHER; note = 2'-fluoro modified nucleotide with phosphorothioate linkage
  modified_base 15: mod_base = OTHER; note = 2'-O-methyl modified nucleotide with phosphorothioate linkage
  modified_base 16: mod_base = OTHER; note = 2'-fluoro modified nucleotide with phosphorothioate linkage
  modified_base 17: mod_base = OTHER; note = 2'-O-methyl modified nucleotide with phosphorothioate linkage
  modified_base 18: mod_base = OTHER; note = 2'-fluoro modified nucleotide with phosphorothioate linkage
  modified_base 19: mod_base = OTHER; note = 2'-O-methyl modified nucleotide with phosphorothioate linkage
  modified_base 20: mod_base = OTHER; note = 2'-O-methyl modified nucleotide
  modified_base 21: mod_base = OTHER; note = 2'-fluoro modified nucleotide
  modified_base 22: mod_base = OTHER; note = 2'-O-methyl modified nucleotide
  modified_base 23: mod_base = OTHER; note = 2'-fluoro modified nucleotide
  modified_base 24: mod_base = OTHER; note = 2'-O-methyl modified nucleotide
  modified_base 25: mod_base = OTHER; note = 2'-fluoro modified nucleotide
  modified_base 26: mod_base = OTHER; note = 2'-O-methyl modified nucleotide
  modified_base 27: mod_base = OTHER; note = 2'-fluoro modified nucleotide
  modified_base 28: mod_base = OTHER; note = 2'-O-methyl modified nucleotide
  modified_base 29: mod_base = OTHER; note = 2'-fluoro modified nucleotide
  modified_base 30: mod_base = OTHER; note = 2'-O-methyl modified nucleotide
  modified_base 31: mod_base = OTHER; note = 2'-fluoro modified nucleotide with phosphorothioate linkage
  modified_base 32: mod_base = OTHER; note = 2'-O-methyl modified nucleotide with phosphorothioate linkage
  misc_difference 33: note = 2'-fluoro modified nucleotide may be attached to trivalent N-Acetylgalactosamine
ttgagttattttgtcaataacaaaataactcaa

SEQ ID NO: 1001 - RNA, 33 nt, synthetic construct
  source 1..33: mol_type = other RNA
  misc_difference 1: note = 2'-O-methyl modified nucleotide with phosphorothioate linkage may be modified with 5'-Phosphate
  modified_base 2: mod_base = OTHER; note = 2'-fluoro modified nucleotide with phosphorothioate linkage
  modified_base 3: mod_base = OTHER; note = 2'-O-methyl modified nucleotide
  modified_base 4: mod_base = OTHER; note = 2'-fluoro modified nucleotide
  modified_base 5: mod_base = OTHER; note = 2'-O-methyl modified nucleotide
  modified_base 6: mod_base = OTHER; note = 2'-fluoro modified nucleotide
  modified_base 7: mod_base = OTHER; note = 2'-O-methyl modified nucleotide
  modified_base 8: mod_base = OTHER; note = 2'-fluoro modified nucleotide
  modified_base 9: mod_base = OTHER; note = 2'-O-methyl modified nucleotide
  modified_base 10: mod_base = OTHER; note = 2'-fluoro modified nucleotide
  modified_base 11: mod_base = OTHER; note = 2'-O-methyl modified nucleotide
  modified_base 12: mod_base = OTHER; note = 2'-fluoro modified nucleotide
  modified_base 13: mod_base = OTHER; note = 2'-O-methyl modified nucleotide
  modified_base 14: mod_base = OTHER; note = 2'-fluoro modified nucleotide with phosphorothioate linkage
  modified_base 15: mod_base = OTHER; note = 2'-O-methyl modified nucleotide with phosphorothioate linkage
  modified_base 16: mod_base = OTHER; note = 2'-fluoro modified nucleotide with phosphorothioate linkage
  modified_base 17: mod_base = OTHER; note = 2'-O-methyl modified nucleotide with phosphorothioate linkage
  modified_base 18: mod_base = OTHER; note = 2'-fluoro modified nucleotide with phosphorothioate linkage
  modified_base 19: mod_base = OTHER; note = 2'-O-methyl modified nucleotide with phosphorothioate linkage
  modified_base 20: mod_base = OTHER; note = 2'-O-methyl modified nucleotide
  modified_base 21: mod_base = OTHER; note = 2'-fluoro modified nucleotide
  modified_base 22: mod_base = OTHER; note = 2'-O-methyl modified nucleotide
  modified_base 23: mod_base = OTHER; note = 2'-fluoro modified nucleotide
  modified_base 24: mod_base = OTHER; note = 2'-O-methyl modified nucleotide
  modified_base 25: mod_base = OTHER; note = 2'-fluoro modified nucleotide
  modified_base 26: mod_base = OTHER; note = 2'-O-methyl modified nucleotide
  modified_base 27: mod_base = OTHER; note = 2'-fluoro modified nucleotide
  modified_base 28: mod_base = OTHER; note = 2'-O-methyl modified nucleotide
  modified_base 29: mod_base = OTHER; note = 2'-fluoro modified nucleotide
  modified_base 30: mod_base = OTHER; note = 2'-O-methyl modified nucleotide
  modified_base 31: mod_base = OTHER; note = 2'-fluoro modified nucleotide with phosphorothioate linkage
  modified_base 32: mod_base = OTHER; note = 2'-O-methyl modified nucleotide with phosphorothioate linkage
  misc_difference 33: note = 2'-fluoro modified nucleotide may be attached to trivalent N-Acetylgalactosamine
taattttccttgaaagatcttcaaggaaaatta

SEQ ID NO: 1002 - RNA, 33 nt, synthetic construct
  source 1..33: mol_type = other RNA
  misc_difference 1: note = 2'-O-methyl modified nucleotide with phosphorothioate linkage may be modified with 5'-Phosphate
  modified_base 2: mod_base = OTHER; note = 2'-fluoro modified nucleotide with phosphorothioate linkage
  modified_base 3: mod_base = OTHER; note = 2'-O-methyl modified nucleotide
  modified_base 4: mod_base = OTHER; note = 2'-fluoro modified nucleotide
  modified_base 5: mod_base = OTHER; note = 2'-O-methyl modified nucleotide
  modified_base 6: mod_base = OTHER; note = 2'-fluoro modified nucleotide
  modified_base 7: mod_base = OTHER; note = 2'-O-methyl modified nucleotide
  modified_base 8: mod_base = OTHER; note = 2'-fluoro modified nucleotide
  modified_base 9: mod_base = OTHER; note = 2'-O-methyl modified nucleotide
  modified_base 10: mod_base = OTHER; note = 2'-fluoro modified nucleotide
  modified_base 11: mod_base = OTHER; note = 2'-O-methyl modified nucleotide
  modified_base 12: mod_base = OTHER; note = 2'-fluoro modified nucleotide
  modified_base 13: mod_base = OTHER; note = 2'-O-methyl modified nucleotide
  modified_base 14: mod_base = OTHER; note = 2'-fluoro modified nucleotide with phosphorothioate linkage
  modified_base 15: mod_base = OTHER; note = 2'-O-methyl modified nucleotide with phosphorothioate linkage
  modified_base 16: mod_base = OTHER; note = 2'-fluoro modified nucleotide with phosphorothioate linkage
  modified_base 17: mod_base = OTHER; note = 2'-O-methyl modified nucleotide with phosphorothioate linkage
  modified_base 18: mod_base = OTHER; note = 2'-fluoro modified nucleotide with phosphorothioate linkage
  modified_base 19: mod_base = OTHER; note = 2'-O-methyl modified nucleotide with phosphorothioate linkage
  modified_base 20: mod_base = OTHER; note = 2'-O-methyl modified nucleotide
  modified_base 21: mod_base = OTHER; note = 2'-fluoro modified nucleotide
  modified_base 22: mod_base = OTHER; note = 2'-O-methyl modified nucleotide
  modified_base 23: mod_base = OTHER; note = 2'-fluoro modified nucleotide
  modified_base 24: mod_base = OTHER; note = 2'-O-methyl modified nucleotide
  modified_base 25: mod_base = OTHER; note = 2'-fluoro modified nucleotide
  modified_base 26: mod_base = OTHER; note = 2'-O-methyl modified nucleotide
  modified_base 27: mod_base = OTHER; note = 2'-fluoro modified nucleotide
  modified_base 28: mod_base = OTHER; note = 2'-O-methyl modified nucleotide
  modified_base 29: mod_base = OTHER; note = 2'-fluoro modified nucleotide
  modified_base 30: mod_base = OTHER; note = 2'-O-methyl modified nucleotide
  modified_base 31: mod_base = OTHER; note = 2'-fluoro modified nucleotide with phosphorothioate linkage
  modified_base 32: mod_base = OTHER; note = 2'-O-methyl modified nucleotide with phosphorothioate linkage
  misc_difference 33: note = 2'-fluoro modified nucleotide may be attached to trivalent N-Acetylgalactosamine
tctgttacagcaatataaaattgctgtaacaga

SEQ ID NO: 1003 - RNA, 33 nt, synthetic construct
  source 1..33: mol_type = other RNA
  misc_difference 1: note = 2'-O-methyl modified nucleotide with phosphorothioate linkage may be modified with 5'-Phosphate
  modified_base 2: mod_base = OTHER; note = 2'-fluoro modified nucleotide with phosphorothioate linkage
  modified_base 3: mod_base = OTHER; note = 2'-O-methyl modified nucleotide
  modified_base 4: mod_base = OTHER; note = 2'-fluoro modified nucleotide
  modified_base 5: mod_base = OTHER; note = 2'-O-methyl modified nucleotide
  modified_base 6: mod_base = OTHER; note = 2'-fluoro modified nucleotide
  modified_base 7: mod_base = OTHER; note = 2'-O-methyl modified nucleotide
  modified_base 8: mod_base = OTHER; note = 2'-fluoro modified nucleotide
  modified_base 9: mod_base = OTHER; note = 2'-O-methyl modified nucleotide
  modified_base 10: mod_base = OTHER; note = 2'-fluoro modified nucleotide
  modified_base 11: mod_base = OTHER; note = 2'-O-methyl modified nucleotide
  modified_base 12: mod_base = OTHER; note = 2'-fluoro modified nucleotide
  modified_base 13: mod_base = OTHER; note = 2'-O-methyl modified nucleotide
  modified_base 14: mod_base = OTHER; note = 2'-fluoro modified nucleotide with phosphorothioate linkage
  modified_base 15: mod_base = OTHER; note = 2'-O-methyl modified nucleotide with phosphorothioate linkage
  modified_base 16: mod_base = OTHER; note = 2'-fluoro modified nucleotide with phosphorothioate linkage
  modified_base 17: mod_base = OTHER; note = 2'-O-methyl modified nucleotide with phosphorothioate linkage
  modified_base 18: mod_base = OTHER; note = 2'-fluoro modified nucleotide with phosphorothioate linkage
  modified_base 19: mod_base = OTHER; note = 2'-O-methyl modified nucleotide with phosphorothioate linkage
  modified_base 20: mod_base = OTHER; note = 2'-O-methyl modified nucleotide
  modified_base 21: mod_base = OTHER; note = 2'-fluoro modified nucleotide
  modified_base 22: mod_base = OTHER; note = 2'-O-methyl modified nucleotide
  modified_base 23: mod_base = OTHER; note = 2'-fluoro modified nucleotide
  modified_base 24: mod_base = OTHER; note = 2'-O-methyl modified nucleotide
  modified_base 25: mod_base = OTHER; note = 2'-fluoro modified nucleotide
  modified_base 26: mod_base = OTHER; note = 2'-O-methyl modified nucleotide
  modified_base 27: mod_base = OTHER; note = 2'-fluoro modified nucleotide
  modified_base 28: mod_base = OTHER; note = 2'-O-methyl modified nucleotide
  modified_base 29: mod_base = OTHER; note = 2'-fluoro modified nucleotide
  modified_base 30: mod_base = OTHER; note = 2'-O-methyl modified nucleotide
  modified_base 31: mod_base = OTHER; note = 2'-fluoro modified nucleotide with phosphorothioate linkage
  modified_base 32: mod_base = OTHER; note = 2'-O-methyl modified nucleotide with phosphorothioate linkage
  misc_difference 33: note = 2'-fluoro modified nucleotide may be attached to trivalent N-Acetylgalactosamine
taatccattgtcataggttatgacaatggatta

SEQ ID NO: 1004 - RNA, 33 nt, synthetic construct
  source 1..33: mol_type = other RNA
  misc_difference 1: note = 2'-O-methyl modified nucleotide with phosphorothioate linkage may be modified with 5'-Phosphate
  modified_base 2: mod_base = OTHER; note = 2'-fluoro modified nucleotide with phosphorothioate linkage
  modified_base 3: mod_base = OTHER; note = 2'-O-methyl modified nucleotide
  modified_base 4: mod_base = OTHER; note = 2'-fluoro modified nucleotide
  modified_base 5: mod_base = OTHER; note = 2'-O-methyl modified nucleotide
  modified_base 6: mod_base = OTHER; note = 2'-fluoro modified nucleotide
  modified_base 7: mod_base = OTHER; note = 2'-O-methyl modified nucleotide
  modified_base 8: mod_base = OTHER; note = 2'-fluoro modified nucleotide
  modified_base 9: mod_base = OTHER; note = 2'-O-methyl modified nucleotide
  modified_base 10: mod_base = OTHER; note = 2'-fluoro modified nucleotide
  modified_base 11: mod_base = OTHER; note = 2'-O-methyl modified nucleotide
  modified_base 12: mod_base = OTHER; note = 2'-fluoro modified nucleotide
  modified_base 13: mod_base = OTHER; note = 2'-O-methyl modified nucleotide
  modified_base 14: mod_base = OTHER; note = 2'-fluoro modified nucleotide with phosphorothioate linkage
  modified_base 15: mod_base = OTHER; note = 2'-O-methyl modified nucleotide with phosphorothioate linkage
  modified_base 16: mod_base = OTHER; note = 2'-fluoro modified nucleotide with phosphorothioate linkage
  modified_base 17: mod_base = OTHER; note = 2'-O-methyl modified nucleotide with phosphorothioate linkage
  modified_base 18: mod_base = OTHER; note = 2'-fluoro modified nucleotide with phosphorothioate linkage
  modified_base 19: mod_base = OTHER; note = 2'-O-methyl modified nucleotide with phosphorothioate linkage
  modified_base 20: mod_base = OTHER; note = 2'-O-methyl modified nucleotide
  modified_base 21: mod_base = OTHER; note = 2'-fluoro modified nucleotide
  modified_base 22: mod_base = OTHER; note = 2'-O-methyl modified nucleotide
  modified_base 23: mod_base = OTHER; note = 2'-fluoro modified nucleotide
  modified_base 24: mod_base = OTHER; note = 2'-O-methyl modified nucleotide
  modified_base 25: mod_base = OTHER; note = 2'-fluoro modified nucleotide
  modified_base 26: mod_base = OTHER; note = 2'-O-methyl modified nucleotide
  modified_base 27: mod_base = OTHER; note = 2'-fluoro modified nucleotide
  modified_base 28: mod_base = OTHER; note = 2'-O-methyl modified nucleotide
  modified_base 29: mod_base = OTHER; note = 2'-fluoro modified nucleotide
  modified_base 30: mod_base = OTHER; note = 2'-O-methyl modified nucleotide
  modified_base 31: mod_base = OTHER; note = 2'-fluoro modified nucleotide with phosphorothioate linkage
  modified_base 32: mod_base = OTHER; note = 2'-O-methyl modified nucleotide with phosphorothioate linkage
  misc_difference 33: note = 2'-fluoro modified nucleotide may be attached to trivalent N-Acetylgalactosamine
tatccattgtcataggttatatgacaatggata

SEQ ID NO: 1005 - RNA, 33 nt, synthetic construct
  source 1..33: mol_type = other RNA
  misc_difference 1: note = 2'-O-methyl modified nucleotide with phosphorothioate linkage may be modified with 5'-Phosphate
  modified_base 2: mod_base = OTHER; note = 2'-fluoro modified nucleotide with phosphorothioate linkage
  modified_base 3: mod_base = OTHER; note = 2'-O-methyl modified nucleotide
  modified_base 4: mod_base = OTHER; note = 2'-fluoro modified nucleotide
  modified_base 5: mod_base = OTHER; note = 2'-O-methyl modified nucleotide
  modified_base 6: mod_base = OTHER; note = 2'-fluoro modified nucleotide
  modified_base 7: mod_base = OTHER; note = 2'-O-methyl modified nucleotide
  modified_base 8: mod_base = OTHER; note = 2'-fluoro modified nucleotide
  modified_base 9: mod_base = OTHER; note = 2'-O-methyl modified nucleotide
  modified_base 10: mod_base = OTHER; note = 2'-fluoro modified nucleotide
  modified_base 11: mod_base = OTHER; note = 2'-O-methyl modified nucleotide
  modified_base 12: mod_base = OTHER; note = 2'-fluoro modified nucleotide
  modified_base 13: mod_base = OTHER; note = 2'-O-methyl modified nucleotide
  modified_base 14: mod_base = OTHER; note = 2'-fluoro modified nucleotide with phosphorothioate linkage
  modified_base 15: mod_base = OTHER; note = 2'-O-methyl modified nucleotide with phosphorothioate linkage
  modified_base 16: mod_base = OTHER; note = 2'-fluoro modified nucleotide with phosphorothioate linkage
  modified_base 17: mod_base = OTHER; note = 2'-O-methyl modified nucleotide with phosphorothioate linkage
  modified_base 18: mod_base = OTHER; note = 2'-fluoro modified nucleotide with phosphorothioate linkage
  modified_base 19: mod_base = OTHER; note = 2'-O-methyl modified nucleotide with phosphorothioate linkage
  modified_base 20: mod_base = OTHER; note = 2'-O-methyl modified nucleotide
  modified_base 21: mod_base = OTHER; note = 2'-fluoro modified nucleotide
  modified_base 22: mod_base = OTHER; note = 2'-O-methyl modified nucleotide
  modified_base 23: mod_base = OTHER; note = 2'-fluoro modified nucleotide
  modified_base 24: mod_base = OTHER; note = 2'-O-methyl modified nucleotide
  modified_base 25: mod_base = OTHER; note = 2'-fluoro modified nucleotide
  modified_base 26: mod_base = OTHER; note = 2'-O-methyl modified nucleotide
  modified_base 27: mod_base = OTHER; note = 2'-fluoro modified nucleotide
  modified_base 28: mod_base = OTHER; note = 2'-O-methyl modified nucleotide
  modified_base 29: mod_base = OTHER; note = 2'-fluoro modified nucleotide
  modified_base 30: mod_base = OTHER; note = 2'-O-methyl modified nucleotide
  modified_base 31: mod_base = OTHER; note = 2'-fluoro modified nucleotide with phosphorothioate linkage
  modified_base 32: mod_base = OTHER; note = 2'-O-methyl modified nucleotide with phosphorothioate linkage
  misc_difference 33: note = 2'-fluoro modified nucleotide may be attached to trivalent N-Acetylgalactosamine
tagaaatccattgtcatagacaatggatttcta

SEQ ID NO: 1006 - RNA, 33 nt, synthetic construct
  source 1..33: mol_type = other RNA
  misc_difference 1: note = 2'-O-methyl modified nucleotide with phosphorothioate linkage may be modified with 5'-Phosphate
  modified_base 2: mod_base = OTHER; note = 2'-fluoro modified nucleotide with phosphorothioate linkage
  modified_base 3: mod_base = OTHER; note = 2'-O-methyl modified nucleotide
  modified_base 4: mod_base = OTHER; note = 2'-fluoro modified nucleotide
  modified_base 5: mod_base = OTHER; note = 2'-O-methyl modified nucleotide
  modified_base 6: mod_base = OTHER; note = 2'-fluoro modified nucleotide
  modified_base 7: mod_base = OTHER; note = 2'-O-methyl modified nucleotide
  modified_base 8: mod_base = OTHER; note = 2'-fluoro modified nucleotide
  modified_base 9: mod_base = OTHER; note = 2'-O-methyl modified nucleotide
  modified_base 10: mod_base = OTHER; note = 2'-fluoro modified nucleotide
  modified_base 11: mod_base = OTHER; note = 2'-O-methyl modified nucleotide
  modified_base 12: mod_base = OTHER; note = 2'-fluoro modified nucleotide
  modified_base 13: mod_base = OTHER; note = 2'-O-methyl modified nucleotide
  modified_base 14: mod_base = OTHER; note = 2'-fluoro modified nucleotide with phosphorothioate linkage
  modified_base 15: mod_base = OTHER; note = 2'-O-methyl modified nucleotide with phosphorothioate linkage
  modified_base 16: mod_base = OTHER; note = 2'-fluoro modified nucleotide with phosphorothioate linkage
  modified_base 17: mod_base = OTHER; note = 2'-O-methyl modified nucleotide with phosphorothioate linkage
  modified_base 18: mod_base = OTHER; note = 2'-fluoro modified nucleotide with phosphorothioate linkage
  modified_base 19: mod_base = OTHER; note = 2'-O-methyl modified nucleotide with phosphorothioate linkage
  modified_base 20: mod_base = OTHER; note = 2'-O-methyl modified nucleotide
  modified_base 21: mod_base = OTHER; note = 2'-fluoro modified nucleotide
  modified_base 22: mod_base = OTHER; note = 2'-O-methyl modified nucleotide
  modified_base 23: mod_base = OTHER; note = 2'-fluoro modified nucleotide
  modified_base 24: mod_base = OTHER; note = 2'-O-methyl modified nucleotide
  modified_base 25: mod_base = OTHER; note = 2'-fluoro modified nucleotide
  modified_base 26: mod_base = OTHER; note = 2'-O-methyl modified nucleotide
  modified_base 27: mod_base = OTHER; note = 2'-fluoro modified nucleotide
  modified_base 28: mod_base = OTHER; note = 2'-O-methyl modified nucleotide
  modified_base 29: mod_base = OTHER; note = 2'-fluoro modified nucleotide
  modified_base 30: mod_base = OTHER; note = 2'-O-methyl modified nucleotide
  modified_base 31: mod_base = OTHER; note = 2'-fluoro modified nucleotide with phosphorothioate linkage
  modified_base 32: mod_base = OTHER; note = 2'-O-methyl modified nucleotide with phosphorothioate linkage
  misc_difference 33: note = 2'-fluoro modified nucleotide may be attached to trivalent N-Acetylgalactosamine
tagacatattctttaacttaaagaatatgtcta

SEQ ID NO: 1007 - RNA, 33 nt, synthetic construct
  source 1..33: mol_type = other RNA
  misc_difference 1: note = 2'-O-methyl modified nucleotide with phosphorothioate linkage may be modified with 5'-Phosphate
  modified_base 2: mod_base = OTHER; note = 2'-fluoro modified nucleotide with phosphorothioate linkage
  modified_base 3: mod_base = OTHER; note = 2'-O-methyl modified nucleotide
  modified_base 4: mod_base = OTHER; note = 2'-fluoro modified nucleotide
  modified_base 5: mod_base = OTHER; note = 2'-O-methyl modified nucleotide
  modified_base 6: mod_base = OTHER; note = 2'-fluoro modified nucleotide
  modified_base 7: mod_base = OTHER; note = 2'-O-methyl modified nucleotide
  modified_base 8: mod_base = OTHER; note = 2'-fluoro modified nucleotide
  modified_base 9: mod_base = OTHER; note = 2'-O-methyl modified nucleotide
  modified_base 10: mod_base = OTHER; note = 2'-fluoro modified nucleotide
  modified_base 11: mod_base = OTHER; note = 2'-O-methyl modified nucleotide
  modified_base 12: mod_base = OTHER; note = 2'-fluoro modified nucleotide
  modified_base 13: mod_base = OTHER; note = 2'-O-methyl modified nucleotide
  modified_base 14: mod_base = OTHER; note = 2'-fluoro modified nucleotide with phosphorothioate linkage
  modified_base 15: mod_base = OTHER; note = 2'-O-methyl modified nucleotide with phosphorothioate linkage
  modified_base 16: mod_base = OTHER; note = 2'-fluoro modified nucleotide with phosphorothioate linkage
  modified_base 17: mod_base = OTHER; note = 2'-O-methyl modified nucleotide with phosphorothioate linkage
  modified_base 18: mod_base = OTHER; note = 2'-fluoro modified nucleotide with phosphorothioate linkage
  modified_base 19: mod_base = OTHER; note = 2'-O-methyl modified nucleotide with phosphorothioate linkage
  modified_base 20: mod_base = OTHER; note = 2'-O-methyl modified nucleotide
  modified_base 21: mod_base = OTHER; note = 2'-fluoro modified nucleotide
  modified_base 22: mod_base = OTHER; note = 2'-O-methyl modified nucleotide
  modified_base 23: mod_base = OTHER; note = 2'-fluoro modified nucleotide
  modified_base 24: mod_base = OTHER; note = 2'-O-methyl modified nucleotide
  modified_base 25: mod_base = OTHER; note = 2'-fluoro modified nucleotide
  modified_base 26: mod_base = OTHER; note = 2'-O-methyl modified nucleotide
  modified_base 27: mod_base = OTHER; note = 2'-fluoro modified nucleotide
  modified_base 28: mod_base = OTHER; note = 2'-O-methyl modified nucleotide
  modified_base 29: mod_base = OTHER; note = 2'-fluoro modified nucleotide
  modified_base 30: mod_base = OTHER; note = 2'-O-methyl modified nucleotide
  modified_base 31: mod_base = OTHER; note = 2'-fluoro modified nucleotide with phosphorothioate linkage
  modified_base 32: mod_base = OTHER; note = 2'-O-methyl modified nucleotide with phosphorothioate linkage
  misc_difference 33: note = 2'-fluoro modified nucleotide may be attached to trivalent N-Acetylgalactosamine
tagtgcagattccctccacgggaatctgcacta

SEQ ID NO: 1008 - RNA, 33 nt, synthetic construct
  source 1..33: mol_type = other RNA
  misc_difference 1: note = 2'-O-methyl modified nucleotide with phosphorothioate linkage may be modified with 5'-Phosphate
  modified_base 2: mod_base = OTHER; note = 2'-fluoro modified nucleotide with phosphorothioate linkage
  modified_base 3: mod_base = OTHER; note = 2'-O-methyl modified nucleotide
  modified_base 4: mod_base = OTHER; note = 2'-fluoro modified nucleotide
  modified_base 5: mod_base = OTHER; note = 2'-O-methyl modified nucleotide
  modified_base 6: mod_base = OTHER; note = 2'-fluoro modified nucleotide
  modified_base 7: mod_base = OTHER; note = 2'-O-methyl modified nucleotide
  modified_base 8: mod_base = OTHER; note = 2'-fluoro modified nucleotide
  modified_base 9: mod_base = OTHER; note = 2'-O-methyl modified nucleotide
  modified_base 10: mod_base = OTHER; note = 2'-fluoro modified nucleotide
  modified_base 11: mod_base = OTHER; note = 2'-O-methyl modified nucleotide
  modified_base 12: mod_base = OTHER; note = 2'-fluoro modified nucleotide
  modified_base 13: mod_base = OTHER; note = 2'-O-methyl modified nucleotide
  modified_base 14: mod_base = OTHER; note = 2'-fluoro modified nucleotide with phosphorothioate linkage
  modified_base 15: mod_base = OTHER; note = 2'-O-methyl modified nucleotide with phosphorothioate linkage
  modified_base 16: mod_base = OTHER; note = 2'-fluoro modified nucleotide with phosphorothioate linkage
  modified_base 17: mod_base = OTHER; note = 2'-O-methyl modified nucleotide with phosphorothioate linkage
  modified_base 18: mod_base = OTHER; note = 2'-fluoro modified nucleotide with phosphorothioate linkage
  modified_base 19: mod_base = OTHER; note = 2'-O-methyl modified nucleotide with phosphorothioate linkage
  modified_base 20: mod_base = OTHER; note = 2'-O-methyl modified nucleotide
  modified_base 21: mod_base = OTHER; note = 2'-fluoro modified nucleotide
  modified_base 22: mod_base = OTHER; note = 2'-O-methyl modified nucleotide
  modified_base 23: mod_base = OTHER; note = 2'-fluoro modified nucleotide
  modified_base 24: mod_base = OTHER; note = 2'-O-methyl modified nucleotide
  modified_base 25: mod_base = OTHER; note = 2'-fluoro modified nucleotide
  modified_base 26: mod_base = OTHER; note = 2'-O-methyl modified nucleotide
  modified_base 27: mod_base = OTHER; note = 2'-fluoro modified nucleotide
  modified_base 28: mod_base = OTHER; note = 2'-O-methyl modified nucleotide
  modified_base 29: mod_base = OTHER; note = 2'-fluoro modified nucleotide
  modified_base 30: mod_base = OTHER; note = 2'-O-methyl modified nucleotide
  modified_base 31: mod_base = OTHER; note = 2'-fluoro modified nucleotide with phosphorothioate linkage
  modified_base 32: mod_base = OTHER; note = 2'-O-methyl modified nucleotide with phosphorothioate linkage
  misc_difference 33: note = 2'-fluoro modified nucleotide may be attached to trivalent N-Acetylgalactosamine
ttccattgtcataggttatctatgacaatggaa

SEQ ID NO: 1009 - RNA, 33 nt, synthetic construct
  source 1..33: mol_type = other RNA
  misc_difference 1: note = 2'-O-methyl modified nucleotide with phosphorothioate linkage may be modified with 5'-Phosphate
  modified_base 2: mod_base = OTHER; note = 2'-fluoro modified nucleotide with phosphorothioate linkage
  modified_base 3: mod_base = OTHER; note = 2'-O-methyl modified nucleotide
  modified_base 4: mod_base = OTHER; note = 2'-fluoro modified nucleotide
  modified_base 5: mod_base = OTHER; note = 2'-O-methyl modified nucleotide
  modified_base 6: mod_base = OTHER; note = 2'-fluoro modified nucleotide
  modified_base 7: mod_base = OTHER; note = 2'-O-methyl modified nucleotide
  modified_base 8: mod_base = OTHER; note = 2'-fluoro modified nucleotide
  modified_base 9: mod_base = OTHER; note = 2'-O-methyl modified nucleotide
  modified_base 10: mod_base = OTHER; note = 2'-fluoro modified nucleotide
  modified_base 11: mod_base = OTHER; note = 2'-O-methyl modified nucleotide
  modified_base 12: mod_base = OTHER; note = 2'-fluoro modified nucleotide
  modified_base 13: mod_base = OTHER; note = 2'-O-methyl modified nucleotide
  modified_base 14: mod_base = OTHER; note = 2'-fluoro modified nucleotide with phosphorothioate linkage
  modified_base 15: mod_base = OTHER; note = 2'-O-methyl modified nucleotide with phosphorothioate linkage
  modified_base 16: mod_base = OTHER; note = 2'-fluoro modified nucleotide with phosphorothioate linkage
  modified_base 17: mod_base = OTHER; note = 2'-O-methyl modified nucleotide with phosphorothioate linkage
  modified_base 18: mod_base = OTHER; note = 2'-fluoro modified nucleotide with phosphorothioate linkage
  modified_base 19: mod_base = OTHER; note = 2'-O-methyl modified nucleotide with phosphorothioate linkage
  modified_base 20: mod_base = OTHER; note = 2'-O-methyl modified nucleotide
  modified_base 21: mod_base = OTHER; note = 2'-fluoro modified nucleotide
  modified_base 22: mod_base = OTHER; note = 2'-O-methyl modified nucleotide
  modified_base 23: mod_base = OTHER; note = 2'-fluoro modified nucleotide
  modified_base 24: mod_base = OTHER; note = 2'-O-methyl modified nucleotide
  modified_base 25: mod_base = OTHER; note = 2'-fluoro modified nucleotide
  modified_base 26: mod_base = OTHER; note = 2'-O-methyl modified nucleotide
  modified_base 27: mod_base = OTHER; note = 2'-fluoro modified nucleotide
  modified_base 28: mod_base = OTHER; note = 2'-O-methyl modified nucleotide
  modified_base 29: mod_base = OTHER; note = 2'-fluoro modified nucleotide
  modified_base 30: mod_base = OTHER; note = 2'-O-methyl modified nucleotide
  modified_base 31: mod_base = OTHER; note = 2'-fluoro modified nucleotide with phosphorothioate linkage
  modified_base 32: mod_base = OTHER; note = 2'-O-methyl modified nucleotide with phosphorothioate linkage
  misc_difference 33: note = 2'-fluoro modified nucleotide may be attached to trivalent N-Acetylgalactosamine
tgacatctttgaacaccttgttcaaagatgtca

SEQ ID NO: 1010 - RNA, 33 nt, synthetic construct
  source 1..33: mol_type = other RNA
  misc_difference 1: note = 2'-O-methyl modified nucleotide with phosphorothioate linkage may be modified with 5'-Phosphate
  modified_base 2: mod_base = OTHER; note = 2'-fluoro modified nucleotide with phosphorothioate linkage
  modified_base 3: mod_base = OTHER; note = 2'-O-methyl modified nucleotide
  modified_base 4: mod_base = OTHER; note = 2'-fluoro modified nucleotide
  modified_base 5: mod_base = OTHER; note = 2'-O-methyl modified nucleotide
  modified_base 6: mod_base = OTHER; note = 2'-fluoro modified nucleotide
  modified_base 7: mod_base = OTHER; note = 2'-O-methyl modified nucleotide
  modified_base 8: mod_base = OTHER; note = 2'-fluoro modified nucleotide
  modified_base 9: mod_base = OTHER; note = 2'-O-methyl modified nucleotide
  modified_base 10: mod_base = OTHER; note = 2'-fluoro modified nucleotide
  modified_base 11: mod_base = OTHER; note = 2'-O-methyl modified nucleotide
  modified_base 12: mod_base = OTHER; note = 2'-fluoro modified nucleotide
  modified_base 13: mod_base = OTHER; note = 2'-O-methyl modified nucleotide
  modified_base 14: mod_base = OTHER; note = 2'-fluoro modified nucleotide with phosphorothioate linkage
  modified_base 15: mod_base = OTHER; note = 2'-O-methyl modified nucleotide with phosphorothioate linkage
  modified_base 16: mod_base = OTHER; note = 2'-fluoro modified nucleotide with phosphorothioate linkage
  modified_base 17: mod_base = OTHER; note = 2'-O-methyl modified nucleotide with phosphorothioate linkage
  modified_base 18: mod_base = OTHER; note = 2'-fluoro modified nucleotide with phosphorothioate linkage
  modified_base 19: mod_base = OTHER; note = 2'-O-methyl modified nucleotide with phosphorothioate linkage
  modified_base 20: mod_base = OTHER; note = 2'-O-methyl modified nucleotide
  modified_base 21: mod_base = OTHER; note = 2'-fluoro modified nucleotide
  modified_base 22: mod_base = OTHER; note = 2'-O-methyl modified nucleotide
  modified_base 23: mod_base = OTHER; note = 2'-fluoro modified nucleotide
  modified_base 24: mod_base = OTHER; note = 2'-O-methyl modified nucleotide
  modified_base 25: mod_base = OTHER; note = 2'-fluoro modified nucleotide
  modified_base 26: mod_base = OTHER; note = 2'-O-methyl modified nucleotide
  modified_base 27: mod_base = OTHER; note = 2'-fluoro modified nucleotide
  modified_base 28: mod_base = OTHER; note = 2'-O-methyl modified nucleotide
  modified_base 29: mod_base = OTHER; note = 2'-fluoro modified nucleotide
  modified_base 30: mod_base = OTHER; note = 2'-O-methyl modified nucleotide
  modified_base 31: mod_base = OTHER; note = 2'-fluoro modified nucleotide with phosphorothioate linkage
  modified_base 32: mod_base = OTHER; note = 2'-O-methyl modified nucleotide with phosphorothioate linkage
  misc_difference 33: note = 2'-fluoro modified nucleotide may be attached to trivalent N-Acetylgalactosamine
tcattgtcataggttattgacctatgacaatga

SEQ ID NO: 1011 - RNA, 33 nt, synthetic construct; identical to SEQ ID NO: 561
  source 1..33: mol_type = other RNA
  misc_difference 1: note = 2'-O-methyl modified nucleotide with phosphorothioate linkage may be modified with 5'-Phosphate
  modified_base 2: mod_base = OTHER; note = 2'-fluoro modified nucleotide with phosphorothioate linkage
  modified_base 3: mod_base = OTHER; note = 2'-O-methyl modified nucleotide
  modified_base 4: mod_base = OTHER; note = 2'-fluoro modified nucleotide
  modified_base 5: mod_base = OTHER; note = 2'-O-methyl modified nucleotide
  modified_base 6: mod_base = OTHER; note = 2'-fluoro modified nucleotide
  modified_base 7: mod_base = OTHER; note = 2'-O-methyl modified nucleotide
  modified_base 8: mod_base = OTHER; note = 2'-fluoro modified nucleotide
  modified_base 9: mod_base = OTHER; note = 2'-O-methyl modified nucleotide
  modified_base 10: mod_base = OTHER; note = 2'-fluoro modified nucleotide
  modified_base 11: mod_base = OTHER; note = 2'-O-methyl modified nucleotide
  modified_base 12: mod_base = OTHER; note = 2'-fluoro modified nucleotide
  modified_base 13: mod_base = OTHER; note = 2'-O-methyl modified nucleotide
  modified_base 14: mod_base = OTHER; note = 2'-fluoro modified nucleotide with phosphorothioate linkage
  modified_base 15: mod_base = OTHER; note = 2'-O-methyl modified nucleotide with phosphorothioate linkage
  modified_base 16: mod_base = OTHER; note = 2'-fluoro modified nucleotide with phosphorothioate linkage
  modified_base 17: mod_base = OTHER; note = 2'-O-methyl modified nucleotide with phosphorothioate linkage
  modified_base 18: mod_base = OTHER; note = 2'-fluoro modified nucleotide with phosphorothioate linkage
  modified_base 19: mod_base = OTHER; note = 2'-O-methyl modified nucleotide with phosphorothioate linkage
  modified_base 20: mod_base = OTHER; note = 2'-O-methyl modified nucleotide
  modified_base 21: mod_base = OTHER; note = 2'-fluoro modified nucleotide
  modified_base 22: mod_base = OTHER; note = 2'-O-methyl modified nucleotide
  modified_base 23: mod_base = OTHER; note = 2'-fluoro modified nucleotide
  modified_base 24: mod_base = OTHER; note = 2'-O-methyl modified nucleotide
  modified_base 25: mod_base = OTHER; note = 2'-fluoro modified nucleotide
  modified_base 26: mod_base = OTHER; note = 2'-O-methyl modified nucleotide
  modified_base 27: mod_base = OTHER; note = 2'-fluoro modified nucleotide
  modified_base 28: mod_base = OTHER; note = 2'-O-methyl modified nucleotide
  modified_base 29: mod_base = OTHER; note = 2'-fluoro modified nucleotide
  modified_base 30: mod_base = OTHER; note = 2'-O-methyl modified nucleotide
  modified_base 31: mod_base = OTHER; note = 2'-fluoro modified nucleotide with phosphorothioate linkage
  modified_base 32: mod_base = OTHER; note = 2'-O-methyl modified nucleotide with phosphorothioate linkage
  misc_difference 33: note = 2'-fluoro modified nucleotide may be attached to trivalent N-Acetylgalactosamine

SEQ ID NO: 1012 - RNA, 33 nt, synthetic construct
  source 1..33: mol_type = other RNA
  misc_difference 1: note = 2'-O-methyl modified nucleotide with phosphorothioate linkage may be modified with 5'-Phosphate
  modified_base 2: mod_base = OTHER; note = 2'-fluoro modified nucleotide with phosphorothioate linkage
  modified_base 3: mod_base = OTHER; note = 2'-O-methyl modified nucleotide
  modified_base 4: mod_base = OTHER; note = 2'-fluoro modified nucleotide
  modified_base 5: mod_base = OTHER; note = 2'-O-methyl modified nucleotide
  modified_base 6: mod_base = OTHER; note = 2'-fluoro modified nucleotide
  modified_base 7: mod_base = OTHER; note = 2'-O-methyl modified nucleotide
  modified_base 8: mod_base = OTHER; note = 2'-fluoro modified nucleotide
  modified_base 9: mod_base = OTHER; note = 2'-O-methyl modified nucleotide
  modified_base 10: mod_base = OTHER; note = 2'-fluoro modified nucleotide
  modified_base 11: mod_base = OTHER; note = 2'-O-methyl modified nucleotide
  modified_base 12: mod_base = OTHER; note = 2'-fluoro modified nucleotide
  modified_base 13: mod_base = OTHER; note = 2'-O-methyl modified nucleotide
  modified_base 14: mod_base = OTHER; note = 2'-fluoro modified nucleotide with phosphorothioate linkage
  modified_base 15: mod_base = OTHER; note = 2'-O-methyl modified nucleotide with phosphorothioate linkage
  modified_base 16: mod_base = OTHER; note = 2'-fluoro modified nucleotide with phosphorothioate linkage
  modified_base 17: mod_base = OTHER; note = 2'-O-methyl modified nucleotide with phosphorothioate linkage
  modified_base 18: mod_base = OTHER; note = 2'-fluoro modified nucleotide with phosphorothioate linkage
  modified_base 19: mod_base = OTHER; note = 2'-O-methyl modified nucleotide with phosphorothioate linkage
  modified_base 20: mod_base = OTHER; note = 2'-O-methyl modified nucleotide
  modified_base 21: mod_base = OTHER; note = 2'-fluoro modified nucleotide
  modified_base 22: mod_base = OTHER; note = 2'-O-methyl modified nucleotide
  modified_base 23: mod_base = OTHER; note = 2'-fluoro modified nucleotide
  modified_base 24: mod_base = OTHER; note = 2'-O-methyl modified nucleotide
  modified_base 25: mod_base = OTHER; note = 2'-fluoro modified nucleotide
  modified_base 26: mod_base = OTHER; note = 2'-O-methyl modified nucleotide
  modified_base 27: mod_base = OTHER; note = 2'-fluoro modified nucleotide
  modified_base 28: mod_base = OTHER; note = 2'-O-methyl modified nucleotide
  modified_base 29: mod_base = OTHER; note = 2'-fluoro modified nucleotide
  modified_base 30: mod_base = OTHER; note = 2'-O-methyl modified nucleotide
  modified_base 31: mod_base = OTHER; note = 2'-fluoro modified nucleotide with phosphorothioate linkage
  modified_base 32: mod_base = OTHER; note = 2'-O-methyl modified nucleotide with phosphorothioate linkage
  misc_difference 33: note = 2'-fluoro modified nucleotide may be attached to trivalent N-Acetylgalactosamine
tacatattctttaacttcattaaagaatatgta

SEQ ID NO: 1013 - RNA, 33 nt, synthetic construct
  source 1..33: mol_type = other RNA
  misc_difference 1: note = 2'-O-methyl modified nucleotide with phosphorothioate linkage may be modified with 5'-Phosphate
  modified_base 2: mod_base = OTHER; note = 2'-fluoro modified nucleotide with phosphorothioate linkage
  modified_base 3: mod_base = OTHER; note = 2'-O-methyl modified nucleotide
  modified_base 4: mod_base = OTHER; note = 2'-fluoro modified nucleotide
  modified_base 5: mod_base = OTHER; note = 2'-O-methyl modified nucleotide
  modified_base 6: mod_base = OTHER; note = 2'-fluoro modified nucleotide
  modified_base 7: mod_base = OTHER; note = 2'-O-methyl modified nucleotide
  modified_base 8: mod_base = OTHER; note = 2'-fluoro modified nucleotide
  modified_base 9: mod_base = OTHER; note = 2'-O-methyl modified nucleotide
  modified_base 10: mod_base = OTHER; note = 2'-fluoro modified nucleotide
  modified_base 11: mod_base = OTHER; note = 2'-O-methyl modified nucleotide
  modified_base 12: mod_base = OTHER; note = 2'-fluoro modified nucleotide
  modified_base 13: mod_base = OTHER; note = 2'-O-methyl modified nucleotide
  modified_base 14: mod_base = OTHER; note = 2'-fluoro modified nucleotide with phosphorothioate linkage
  modified_base 15: mod_base = OTHER; note = 2'-O-methyl modified nucleotide with phosphorothioate linkage
  modified_base 16: mod_base = OTHER; note = 2'-fluoro modified nucleotide with phosphorothioate linkage
  modified_base 17: mod_base = OTHER; note = 2'-O-methyl modified nucleotide with phosphorothioate linkage
  modified_base 18: mod_base = OTHER; note = 2'-fluoro modified nucleotide with phosphorothioate linkage
  modified_base 19: mod_base = OTHER; note = 2'-O-methyl modified nucleotide with phosphorothioate linkage
  modified_base 20: mod_base = OTHER; note = 2'-O-methyl modified nucleotide
  modified_base 21: mod_base = OTHER; note = 2'-fluoro modified nucleotide
  modified_base 22: mod_base = OTHER; note = 2'-O-methyl modified nucleotide
  modified_base 23: mod_base = OTHER; note = 2'-fluoro modified nucleotide
  modified_base 24: mod_base = OTHER; note = 2'-O-methyl modified nucleotide
  modified_base 25: mod_base = OTHER; note = 2'-fluoro modified nucleotide
  modified_base 26: mod_base = OTHER; note = 2'-O-methyl modified nucleotide
  modified_base 27: mod_base = OTHER; note = 2'-fluoro modified nucleotide
  modified_base 28: mod_base = OTHER; note = 2'-O-methyl modified nucleotide
  modified_base 29: mod_base = OTHER; note = 2'-fluoro modified nucleotide
  modified_base 30: mod_base = OTHER; note = 2'-O-methyl modified nucleotide
  modified_base 31: mod_base = OTHER; note = 2'-fluoro modified nucleotide with phosphorothioate linkage
  modified_base 32: mod_base = OTHER; note = 2'-O-methyl modified nucleotide with phosphorothioate linkage
  misc_difference 33: note = 2'-fluoro modified nucleotide may be attached to trivalent N-Acetylgalactosamine
tagtccttttacactcaaagtgtaaaaggacta

SEQ ID NO: 1014 - RNA, 33 nt, synthetic construct
  source 1..33: mol_type = other RNA
  misc_difference 1: note = 2'-O-methyl modified nucleotide with phosphorothioate linkage may be modified with 5'-Phosphate
  modified_base 2: mod_base = OTHER; note = 2'-fluoro modified nucleotide with phosphorothioate linkage
  modified_base 3: mod_base = OTHER; note = 2'-O-methyl modified nucleotide
  modified_base 4: mod_base = OTHER; note = 2'-fluoro modified nucleotide
  modified_base 5: mod_base = OTHER; note = 2'-O-methyl modified nucleotide
  modified_base 6: mod_base = OTHER; note = 2'-fluoro modified nucleotide
  modified_base 7: mod_base = OTHER; note = 2'-O-methyl modified nucleotide
  modified_base 8: mod_base = OTHER; note = 2'-fluoro modified nucleotide
  modified_base 9: mod_base = OTHER; note = 2'-O-methyl modified nucleotide
  modified_base 10: mod_base = OTHER; note = 2'-fluoro modified nucleotide
  modified_base 11: mod_base = OTHER; note = 2'-O-methyl modified nucleotide
  modified_base 12: mod_base = OTHER; note = 2'-fluoro modified nucleotide
  modified_base 13: mod_base = OTHER; note = 2'-O-methyl modified nucleotide
  modified_base 14: mod_base = OTHER; note = 2'-fluoro modified nucleotide with phosphorothioate linkage
  modified_base 15: mod_base = OTHER; note = 2'-O-methyl modified nucleotide with phosphorothioate linkage
  modified_base 16: mod_base = OTHER; note = 2'-fluoro modified nucleotide with phosphorothioate linkage
  modified_base 17: mod_base = OTHER; note = 2'-O-methyl modified nucleotide with phosphorothioate linkage
  modified_base 18: mod_base = OTHER; note = 2'-fluoro modified nucleotide with phosphorothioate linkage
  modified_base 19: mod_base = OTHER; note = 2'-O-methyl modified nucleotide with phosphorothioate linkage
  modified_base 20: mod_base = OTHER; note = 2'-O-methyl modified nucleotide
  modified_base 21: mod_base = OTHER; note = 2'-fluoro modified nucleotide
  modified_base 22: mod_base = OTHER; note = 2'-O-methyl modified nucleotide
  modified_base 23: mod_base = OTHER; note = 2'-fluoro modified nucleotide
  modified_base 24: mod_base = OTHER; note = 2'-O-methyl modified nucleotide
  modified_base 25: mod_base = OTHER; note = 2'-fluoro modified nucleotide
  modified_base 26: mod_base = OTHER; note = 2'-O-methyl modified nucleotide
  modified_base 27: mod_base = OTHER; note = 2'-fluoro modified nucleotide
  modified_base 28: mod_base = OTHER; note = 2'-O-methyl modified nucleotide
  modified_base 29: mod_base = OTHER; note = 2'-fluoro modified nucleotide
  modified_base 30: mod_base = OTHER; note = 2'-O-methyl modified nucleotide
  modified_base 31: mod_base = OTHER; note = 2'-fluoro modified nucleotide with phosphorothioate linkage
  modified_base 32: mod_base = OTHER; note = 2'-O-methyl modified nucleotide with phosphorothioate linkage
  misc_difference 33: note = 2'-fluoro modified nucleotide may be attached to trivalent N-Acetylgalactosamine
tattttccttgaaagatcctttcaaggaaaata

SEQ ID NO: 1015 - RNA, 33 nt, synthetic construct; identical to SEQ ID NO: 565
  source 1..33: mol_type = other RNA
  misc_difference 1: note = 2'-O-methyl modified nucleotide with phosphorothioate linkage may be modified with 5'-Phosphate
  modified_base 2: mod_base = OTHER; note = 2'-fluoro modified nucleotide with phosphorothioate linkage
  modified_base 3: mod_base = OTHER; note = 2'-O-methyl modified nucleotide
  modified_base 4: mod_base = OTHER; note = 2'-fluoro modified nucleotide
  modified_base 5: mod_base = OTHER; note = 2'-O-methyl modified nucleotide
  modified_base 6: mod_base = OTHER; note = 2'-fluoro modified nucleotide
  modified_base 7: mod_base = OTHER; note = 2'-O-methyl modified nucleotide
  modified_base 8: mod_base = OTHER; note = 2'-fluoro modified nucleotide
  modified_base 9: mod_base = OTHER; note = 2'-O-methyl modified nucleotide
  modified_base 10: mod_base = OTHER; note = 2'-fluoro modified nucleotide
  modified_base 11: mod_base = OTHER; note = 2'-O-methyl modified nucleotide
  modified_base 12: mod_base = OTHER; note = 2'-fluoro modified nucleotide
  modified_base 13: mod_base = OTHER; note = 2'-O-methyl modified nucleotide
  modified_base 14: mod_base = OTHER; note = 2'-fluoro modified nucleotide with phosphorothioate linkage
  modified_base 15: mod_base = OTHER; note = 2'-O-methyl modified nucleotide with phosphorothioate linkage
  modified_base 16: mod_base = OTHER; note = 2'-fluoro modified nucleotide with phosphorothioate linkage
  modified_base 17: mod_base = OTHER; note = 2'-O-methyl modified nucleotide with phosphorothioate linkage
  modified_base 18: mod_base = OTHER; note = 2'-fluoro modified nucleotide with phosphorothioate linkage
  modified_base 19: mod_base = OTHER; note = 2'-O-methyl modified nucleotide with phosphorothioate linkage
  modified_base 20: mod_base = OTHER; note = 2'-O-methyl modified nucleotide
  modified_base 21: mod_base = OTHER; note = 2'-fluoro modified nucleotide
  modified_base 22: mod_base = OTHER; note = 2'-O-methyl modified nucleotide
  modified_base 23: mod_base = OTHER; note = 2'-fluoro modified nucleotide
  modified_base 24: mod_base = OTHER; note = 2'-O-methyl modified nucleotide
  modified_base 25: mod_base = OTHER; note = 2'-fluoro modified nucleotide
  modified_base 26: mod_base = OTHER; note = 2'-O-methyl modified nucleotide
  modified_base 27: mod_base = OTHER; note = 2'-fluoro modified nucleotide
  modified_base 28: mod_base = OTHER; note = 2'-O-methyl modified nucleotide
  modified_base 29: mod_base = OTHER; note = 2'-fluoro modified nucleotide
  modified_base 30: mod_base = OTHER; note = 2'-O-methyl modified nucleotide
  modified_base 31: mod_base = OTHER; note = 2'-fluoro modified nucleotide with phosphorothioate linkage
  modified_base 32: mod_base = OTHER; note = 2'-O-methyl modified nucleotide with phosphorothioate linkage
  misc_difference 33: note = 2'-fluoro modified nucleotide may be attached to trivalent N-Acetylgalactosamine

SEQ ID NO: 1016 - RNA, 33 nt, synthetic construct
  source 1..33: mol_type = other RNA
  misc_difference 1: note = 2'-O-methyl modified nucleotide with phosphorothioate linkage may be modified with 5'-Phosphate
  modified_base 2: mod_base = OTHER; note = 2'-fluoro modified nucleotide with phosphorothioate linkage
  modified_base 3: mod_base = OTHER; note = 2'-O-methyl modified nucleotide
  modified_base 4: mod_base = OTHER; note = 2'-fluoro modified nucleotide
  modified_base 5: mod_base = OTHER; note = 2'-O-methyl modified nucleotide
  modified_base 6: mod_base = OTHER; note = 2'-fluoro modified nucleotide
  modified_base 7: mod_base = OTHER; note = 2'-O-methyl modified nucleotide
  modified_base 8: mod_base = OTHER; note = 2'-fluoro modified nucleotide
  modified_base 9: mod_base = OTHER; note = 2'-O-methyl modified nucleotide
  modified_base 10: mod_base = OTHER; note = 2'-fluoro modified nucleotide
  modified_base 11: mod_base = OTHER; note = 2'-O-methyl modified nucleotide
  modified_base 12: mod_base = OTHER; note = 2'-fluoro modified nucleotide
  modified_base 13: mod_base = OTHER; note = 2'-O-methyl modified nucleotide
  modified_base 14: mod_base = OTHER; note = 2'-fluoro modified nucleotide with phosphorothioate linkage
  modified_base 15: mod_base = OTHER; note = 2'-O-methyl modified nucleotide with phosphorothioate linkage
  modified_base 16: mod_base = OTHER; note = 2'-fluoro modified nucleotide with phosphorothioate linkage
  modified_base 17: mod_base = OTHER; note = 2'-O-methyl modified nucleotide with phosphorothioate linkage
  modified_base 18: mod_base = OTHER; note = 2'-fluoro modified nucleotide with phosphorothioate linkage
  modified_base 19: mod_base = OTHER; note = 2'-O-methyl modified nucleotide with phosphorothioate linkage
  modified_base 20: mod_base = OTHER; note = 2'-O-methyl modified nucleotide
  modified_base 21: mod_base = OTHER; note = 2'-fluoro modified nucleotide
  modified_base 22: mod_base = OTHER; note = 2'-O-methyl modified nucleotide
  modified_base 23: mod_base = OTHER; note = 2'-fluoro modified nucleotide
  modified_base 24: mod_base = OTHER; note = 2'-O-methyl modified nucleotide
  modified_base 25: mod_base = OTHER; note = 2'-fluoro modified nucleotide
  modified_base 26: mod_base = OTHER; note = 2'-O-methyl modified nucleotide
  modified_base 27: mod_base = OTHER; note = 2'-fluoro modified nucleotide
  modified_base 28: mod_base = OTHER; note = 2'-O-methyl modified nucleotide
  modified_base 29: mod_base = OTHER; note = 2'-fluoro modified nucleotide
  modified_base 30: mod_base = OTHER; note = 2'-O-methyl modified nucleotide
  modified_base 31: mod_base = OTHER; note = 2'-fluoro modified nucleotide with phosphorothioate linkage
  modified_base 32: mod_base = OTHER; note = 2'-O-methyl modified nucleotide with phosphorothioate linkage
  misc_difference 33: note = 2'-fluoro modified nucleotide may be attached to trivalent N-Acetylgalactosamine
tgtaatttcaaaattcttaattttgaaattaca

SEQ ID NO: 1017 - RNA, 33 nt, synthetic construct
  source 1..33: mol_type = other RNA
  misc_difference 1: note = 2'-O-methyl modified nucleotide with phosphorothioate linkage may be modified with 5'-Phosphate
  modified_base 2: mod_base = OTHER; note = 2'-fluoro modified nucleotide with phosphorothioate linkage
  modified_base 3: mod_base = OTHER; note = 2'-O-methyl modified nucleotide
  modified_base 4: mod_base = OTHER; note = 2'-fluoro modified nucleotide
  modified_base 5: mod_base = OTHER; note = 2'-O-methyl modified nucleotide
  modified_base 6: mod_base = OTHER; note = 2'-fluoro modified nucleotide
  modified_base 7: mod_base = OTHER; note = 2'-O-methyl modified nucleotide
  modified_base 8: mod_base = OTHER; note = 2'-fluoro modified nucleotide
  modified_base 9: mod_base = OTHER; note = 2'-O-methyl modified nucleotide
  modified_base 10: mod_base = OTHER; note = 2'-fluoro modified nucleotide
  modified_base 11: mod_base = OTHER; note = 2'-O-methyl modified nucleotide
  modified_base 12: mod_base = OTHER; note = 2'-fluoro modified nucleotide
  modified_base 13: mod_base = OTHER; note = 2'-O-methyl modified nucleotide
  modified_base 14: mod_base = OTHER; note = 2'-fluoro modified nucleotide with phosphorothioate linkage
  modified_base 15: mod_base = OTHER; note = 2'-O-methyl modified nucleotide with phosphorothioate linkage
  modified_base 16: mod_base = OTHER; note = 2'-fluoro modified nucleotide with phosphorothioate linkage
  modified_base 17: mod_base = OTHER; note = 2'-O-methyl modified nucleotide with phosphorothioate linkage
  modified_base 18: mod_base = OTHER; note = 2'-fluoro modified nucleotide with phosphorothioate linkage
  modified_base 19: mod_base = OTHER; note = 2'-O-methyl modified nucleotide with phosphorothioate linkage
  modified_base 20: mod_base = OTHER; note = 2'-O-methyl modified nucleotide
  modified_base 21: mod_base = OTHER; note = 2'-fluoro modified nucleotide
  modified_base 22: mod_base = OTHER; note = 2'-O-methyl modified nucleotide
  modified_base 23: mod_base = OTHER; note = 2'-fluoro modified nucleotide
  modified_base 24: mod_base = OTHER; note = 2'-O-methyl modified nucleotide
  modified_base 25: mod_base = OTHER; note = 2'-fluoro modified nucleotide
  modified_base 26: mod_base = OTHER; note = 2'-O-methyl modified nucleotide
  modified_base 27: mod_base = OTHER; note = 2'-fluoro modified nucleotide
  modified_base 28: mod_base = OTHER; note = 2'-O-methyl modified nucleotide
  modified_base 29: mod_base = OTHER; note = 2'-fluoro modified nucleotide
  modified_base 30: mod_base = OTHER; note = 2'-O-methyl modified nucleotide
  modified_base 31: mod_base = OTHER; note = 2'-fluoro modified nucleotide with phosphorothioate linkage
  modified_base 32: mod_base = OTHER; note = 2'-O-methyl modified nucleotide with phosphorothioate linkage
  misc_difference 33: note = 2'-fluoro modified nucleotide may be attached to trivalent N-Acetylgalactosamine
taaaattcttaaagttcttctttaagaatttta

SEQ ID NO: 1018 - RNA, 33 nt, synthetic construct; identical to SEQ ID NO: 568
  source 1..33: mol_type = other RNA
  misc_difference 1: note = 2'-O-methyl modified nucleotide with phosphorothioate linkage may be modified with 5'-Phosphate
  modified_base 2: mod_base = OTHER; note = 2'-fluoro modified nucleotide with phosphorothioate linkage
  modified_base 3: mod_base = OTHER; note = 2'-O-methyl modified nucleotide
  modified_base 4: mod_base = OTHER; note = 2'-fluoro modified nucleotide
  modified_base 5: mod_base = OTHER; note = 2'-O-methyl modified nucleotide
  modified_base 6: mod_base = OTHER; note = 2'-fluoro modified nucleotide
  modified_base 7: mod_base = OTHER; note = 2'-O-methyl modified nucleotide
  modified_base 8: mod_base = OTHER; note = 2'-fluoro modified nucleotide
  modified_base 9: mod_base = OTHER; note = 2'-O-methyl modified nucleotide
  modified_base 10: mod_base = OTHER; note = 2'-fluoro modified nucleotide
  modified_base 11: mod_base = OTHER; note = 2'-O-methyl modified nucleotide
  modified_base 12: mod_base = OTHER; note = 2'-fluoro modified nucleotide
  modified_base 13: mod_base = OTHER; note = 2'-O-methyl modified nucleotide
  modified_base 14: mod_base = OTHER; note = 2'-fluoro modified nucleotide with phosphorothioate linkage
  modified_base 15: mod_base = OTHER; note = 2'-O-methyl modified nucleotide with phosphorothioate linkage
  modified_base 16: mod_base = OTHER; note = 2'-fluoro modified nucleotide with phosphorothioate linkage
  modified_base 17: mod_base = OTHER; note = 2'-O-methyl modified nucleotide with phosphorothioate linkage
  modified_base 18: mod_base = OTHER; note = 2'-fluoro modified nucleotide with phosphorothioate linkage
  modified_base 19: mod_base = OTHER; note = 2'-O-methyl modified nucleotide with phosphorothioate linkage
  modified_base 20: mod_base = OTHER; note = 2'-O-methyl modified nucleotide
  modified_base 21: mod_base = OTHER; note = 2'-fluoro modified nucleotide
  modified_base 22: mod_base = OTHER; note = 2'-O-methyl modified nucleotide
  modified_base 23: mod_base = OTHER; note = 2'-fluoro modified nucleotide
  modified_base 24: mod_base = OTHER; note = 2'-O-methyl modified nucleotide
  modified_base 25: mod_base = OTHER; note = 2'-fluoro modified nucleotide
  modified_base 26: mod_base = OTHER; note = 2'-O-methyl modified nucleotide
  modified_base 27: mod_base = OTHER; note = 2'-fluoro modified nucleotide
  modified_base 28: mod_base = OTHER; note = 2'-O-methyl modified nucleotide
  modified_base 29: mod_base = OTHER; note = 2'-fluoro modified nucleotide
  modified_base 30: mod_base = OTHER; note = 2'-O-methyl modified nucleotide
  modified_base 31: mod_base = OTHER; note = 2'-fluoro modified nucleotide with phosphorothioate linkage
  modified_base 32: mod_base = OTHER; note = 2'-O-methyl modified nucleotide with phosphorothioate linkage
  misc_difference 33: note = 2'-fluoro modified nucleotide may be attached to trivalent N-Acetylgalactosamine

SEQ ID NO: 1019 - RNA, 33 nt, synthetic construct; identical to SEQ ID NO: 569
  source 1..33: mol_type = other RNA
  misc_difference 1: note = 2'-O-methyl modified nucleotide with phosphorothioate linkage may be modified with 5'-Phosphate
  modified_base 2: mod_base = OTHER; note = 2'-fluoro modified nucleotide with phosphorothioate linkage
  modified_base 3: mod_base = OTHER; note = 2'-O-methyl modified nucleotide
  modified_base 4: mod_base = OTHER; note = 2'-fluoro modified nucleotide
  modified_base 5: mod_base = OTHER; note = 2'-O-methyl modified nucleotide
  modified_base 6: mod_base = OTHER; note = 2'-fluoro modified nucleotide
  modified_base 7: mod_base = OTHER; note = 2'-O-methyl modified nucleotide
  modified_base 8: mod_base = OTHER; note = 2'-fluoro modified nucleotide
  modified_base 9: mod_base = OTHER; note = 2'-O-methyl modified nucleotide
  modified_base 10: mod_base = OTHER; note = 2'-fluoro modified nucleotide
  modified_base 11: mod_base = OTHER; note = 2'-O-methyl modified nucleotide
  modified_base 12: mod_base = OTHER; note = 2'-fluoro modified nucleotide
  modified_base 13: mod_base = OTHER; note = 2'-O-methyl modified nucleotide
  modified_base 14: mod_base = OTHER; note = 2'-fluoro modified nucleotide with phosphorothioate linkage
  modified_base 15: mod_base = OTHER; note = 2'-O-methyl modified nucleotide with phosphorothioate linkage
  modified_base 16: mod_base = OTHER; note = 2'-fluoro modified nucleotide with phosphorothioate linkage
  modified_base 17: mod_base = OTHER; note = 2'-O-methyl modified nucleotide with phosphorothioate linkage
  modified_base 18: mod_base = OTHER; note = 2'-fluoro modified nucleotide with phosphorothioate linkage
  modified_base 19: mod_base = OTHER; note = 2'-O-methyl modified nucleotide with phosphorothioate linkage
  modified_base 20: mod_base = OTHER; note = 2'-O-methyl modified nucleotide
  modified_base 21: mod_base = OTHER; note = 2'-fluoro modified nucleotide
  modified_base 22: mod_base = OTHER; note = 2'-O-methyl modified nucleotide
  modified_base 23: mod_base = OTHER; note = 2'-fluoro modified nucleotide
  modified_base 24: mod_base = OTHER; note = 2'-O-methyl modified nucleotide
  modified_base 25: mod_base = OTHER; note = 2'-fluoro modified nucleotide
  modified_base 26: mod_base = OTHER; note = 2'-O-methyl modified nucleotide
  modified_base 27: mod_base = OTHER; note = 2'-fluoro modified nucleotide
  modified_base 28: mod_base = OTHER; note = 2'-O-methyl modified nucleotide
  modified_base 29: mod_base = OTHER; note = 2'-fluoro modified nucleotide
  modified_base 30: mod_base = OTHER; note = 2'-O-methyl modified nucleotide
  modified_base 31: mod_base = OTHER; note = 2'-fluoro modified nucleotide with phosphorothioate linkage
  modified_base 32: mod_base = OTHER; note = 2'-O-methyl modified nucleotide with phosphorothioate linkage
  misc_difference 33: note = 2'-fluoro modified nucleotide may be attached to trivalent N-Acetylgalactosamine

SEQ ID NO: 1020 - RNA, 33 nt, synthetic construct
  source 1..33: mol_type = other RNA
  misc_difference 1: note = 2'-O-methyl modified nucleotide with phosphorothioate linkage may be modified with 5'-Phosphate
  modified_base 2: mod_base = OTHER; note = 2'-fluoro modified nucleotide with phosphorothioate linkage
  modified_base 3: mod_base = OTHER; note = 2'-O-methyl modified nucleotide
  modified_base 4: mod_base = OTHER; note = 2'-fluoro modified nucleotide
  modified_base 5: mod_base = OTHER; note = 2'-O-methyl modified nucleotide
  modified_base 6: mod_base = OTHER; note = 2'-fluoro modified nucleotide
  modified_base 7: mod_base = OTHER; note = 2'-O-methyl modified nucleotide
  modified_base 8: mod_base = OTHER; note = 2'-fluoro modified nucleotide
  modified_base 9: mod_base = OTHER; note = 2'-O-methyl modified nucleotide
  modified_base 10: mod_base = OTHER; note = 2'-fluoro modified nucleotide
  modified_base 11: mod_base = OTHER; note = 2'-O-methyl modified nucleotide
  modified_base 12: mod_base = OTHER; note = 2'-fluoro modified nucleotide
  modified_base 13: mod_base = OTHER; note = 2'-O-methyl modified nucleotide
  modified_base 14: mod_base = OTHER; note = 2'-fluoro modified nucleotide with phosphorothioate linkage
  modified_base 15: mod_base = OTHER; note = 2'-O-methyl modified nucleotide with phosphorothioate linkage
  modified_base 16: mod_base = OTHER; note = 2'-fluoro modified nucleotide with phosphorothioate linkage
  modified_base 17: mod_base = OTHER; note = 2'-O-methyl modified nucleotide with phosphorothioate linkage
  modified_base 18: mod_base = OTHER; note = 2'-fluoro modified nucleotide with phosphorothioate linkage
  modified_base 19: mod_base = OTHER; note = 2'-O-methyl modified nucleotide with phosphorothioate linkage
  modified_base 20: mod_base = OTHER; note = 2'-O-methyl modified nucleotide
  modified_base 21: mod_base = OTHER; note = 2'-fluoro modified nucleotide
  modified_base 22: mod_base = OTHER; note = 2'-O-methyl modified nucleotide
  modified_base 23: mod_base = OTHER; note = 2'-fluoro modified nucleotide
  modified_base 24: mod_base = OTHER; note = 2'-O-methyl modified nucleotide
  modified_base 25: mod_base = OTHER; note = 2'-fluoro modified nucleotide
  modified_base 26: mod_base = OTHER; note = 2'-O-methyl modified nucleotide
  modified_base 27: mod_base = OTHER; note = 2'-fluoro modified nucleotide
  modified_base 28: mod_base = OTHER; note = 2'-O-methyl modified nucleotide
  modified_base 29: mod_base = OTHER; note = 2'-fluoro modified nucleotide
  modified_base 30: mod_base = OTHER; note = 2'-O-methyl modified nucleotide
  modified_base 31: mod_base = OTHER; note = 2'-fluoro modified nucleotide with phosphorothioate linkage
  modified_base 32: mod_base = OTHER; note = 2'-O-methyl modified nucleotide with phosphorothioate linkage
  misc_difference 33: note = 2'-fluoro modified nucleotide may be attached to trivalent N-Acetylgalactosamine
tcaaatcctgtactgacaaagtacaggatttga

SEQ ID NO: 1021 - RNA, 33 nt, synthetic construct
  source 1..33: mol_type = other RNA
  misc_difference 1: note = 2'-O-methyl modified nucleotide with phosphorothioate linkage may be modified with 5'-Phosphate
  modified_base 2: mod_base = OTHER; note = 2'-fluoro modified nucleotide with phosphorothioate linkage
  modified_base 3: mod_base = OTHER; note = 2'-O-methyl modified nucleotide
  modified_base 4: mod_base = OTHER; note = 2'-fluoro modified nucleotide
  modified_base 5: mod_base = OTHER; note = 2'-O-methyl modified nucleotide
  modified_base 6: mod_base = OTHER; note = 2'-fluoro modified nucleotide
  modified_base 7: mod_base = OTHER; note = 2'-O-methyl modified nucleotide
  modified_base 8: mod_base = OTHER; note = 2'-fluoro modified nucleotide
  modified_base 9: mod_base = OTHER; note = 2'-O-methyl modified nucleotide
  modified_base 10: mod_base = OTHER; note = 2'-fluoro modified nucleotide
  modified_base 11: mod_base = OTHER; note = 2'-O-methyl modified nucleotide
  modified_base 12: mod_base = OTHER; note = 2'-fluoro modified nucleotide
  modified_base 13: mod_base = OTHER; note = 2'-O-methyl modified nucleotide
  modified_base 14: mod_base = OTHER; note = 2'-fluoro modified nucleotide with phosphorothioate linkage
  modified_base 15: mod_base = OTHER; note = 2'-O-methyl modified nucleotide with phosphorothioate linkage
  modified_base 16: mod_base = OTHER; note = 2'-fluoro modified nucleotide with phosphorothioate linkage
  modified_base 17: mod_base = OTHER; note = 2'-O-methyl modified nucleotide with phosphorothioate linkage
  modified_base 18: mod_base = OTHER; note = 2'-fluoro modified nucleotide with phosphorothioate linkage
  modified_base 19: mod_base = OTHER; note = 2'-O-methyl modified nucleotide with phosphorothioate linkage
  modified_base 20: mod_base = OTHER; note = 2'-O-methyl modified nucleotide
  modified_base 21: mod_base = OTHER; note = 2'-fluoro modified nucleotide
  modified_base 22: mod_base = OTHER; note = 2'-O-methyl modified nucleotide
  modified_base 23: mod_base = OTHER; note = 2'-fluoro modified nucleotide
  modified_base 24: mod_base = OTHER; note = 2'-O-methyl modified nucleotide
  modified_base 25: mod_base = OTHER; note = 2'-fluoro modified nucleotide
  modified_base 26: mod_base = OTHER; note = 2'-O-methyl modified nucleotide
  modified_base 27: mod_base = OTHER; note = 2'-fluoro modified nucleotide
  modified_base 28: mod_base = OTHER; note = 2'-O-methyl modified nucleotide
  modified_base 29: mod_base = OTHER; note = 2'-fluoro modified nucleotide
  modified_base 30: mod_base = OTHER; note = 2'-O-methyl modified nucleotide
  modified_base 31: mod_base = OTHER; note = 2'-fluoro modified nucleotide with phosphorothioate linkage
  modified_base 32: mod_base = OTHER; note = 2'-O-methyl modified nucleotide with phosphorothioate linkage
  misc_difference 33: note = 2'-fluoro modified nucleotide may be attached to trivalent N-Acetylgalactosamine
tgataacttttaatagagaattaaaagttatca

SEQ ID NO: 1022 - RNA, 33 nt, synthetic construct; identical to SEQ ID NO: 572
  source 1..33: mol_type = other RNA
  misc_difference 1: note = 2'-O-methyl modified nucleotide with phosphorothioate linkage may be modified with 5'-Phosphate
  modified_base 2: mod_base = OTHER; note = 2'-fluoro modified nucleotide with phosphorothioate linkage
  modified_base 3: mod_base = OTHER; note = 2'-O-methyl modified nucleotide
  modified_base 4: mod_base = OTHER; note = 2'-fluoro modified nucleotide
  modified_base 5: mod_base = OTHER; note = 2'-O-methyl modified nucleotide
  modified_base 6: mod_base = OTHER; note = 2'-fluoro modified nucleotide
  modified_base 7: mod_base = OTHER; note = 2'-O-methyl modified nucleotide
  modified_base 8: mod_base = OTHER; note = 2'-fluoro modified nucleotide
  modified_base 9: mod_base = OTHER; note = 2'-O-methyl modified nucleotide
  modified_base 10: mod_base = OTHER; note = 2'-fluoro modified nucleotide
  modified_base 11: mod_base = OTHER; note = 2'-O-methyl modified nucleotide
  modified_base 12: mod_base = OTHER; note = 2'-fluoro modified nucleotide
  modified_base 13: mod_base = OTHER; note = 2'-O-methyl modified nucleotide
  modified_base 14: mod_base = OTHER; note = 2'-fluoro modified nucleotide with phosphorothioate linkage
  modified_base 15: mod_base = OTHER; note = 2'-O-methyl modified nucleotide with phosphorothioate linkage
  modified_base 16: mod_base = OTHER; note = 2'-fluoro modified nucleotide with phosphorothioate linkage
  modified_base 17: mod_base = OTHER; note = 2'-O-methyl modified nucleotide with phosphorothioate linkage
  modified_base 18: mod_base = OTHER; note = 2'-fluoro modified nucleotide with phosphorothioate linkage
  modified_base 19: mod_base = OTHER; note = 2'-O-methyl modified nucleotide with phosphorothioate linkage
  modified_base 20: mod_base = OTHER; note = 2'-O-methyl modified nucleotide
  modified_base 21: mod_base = OTHER; note = 2'-fluoro modified nucleotide
  modified_base 22: mod_base = OTHER; note = 2'-O-methyl modified nucleotide
  modified_base 23: mod_base = OTHER; note = 2'-fluoro modified nucleotide
  modified_base 24: mod_base = OTHER; note = 2'-O-methyl modified nucleotide
  modified_base 25: mod_base = OTHER; note = 2'-fluoro modified nucleotide
  modified_base 26: mod_base = OTHER; note = 2'-O-methyl modified nucleotide
  modified_base 27: mod_base = OTHER; note = 2'-fluoro modified nucleotide
  modified_base 28: mod_base = OTHER; note = 2'-O-methyl modified nucleotide
  modified_base 29: mod_base = OTHER; note = 2'-fluoro modified nucleotide
  modified_base 30: mod_base = OTHER; note = 2'-O-methyl modified nucleotide
  modified_base 31: mod_base = OTHER; note = 2'-fluoro modified nucleotide with phosphorothioate linkage
  modified_base 32: mod_base = OTHER; note = 2'-O-methyl modified nucleotide with phosphorothioate linkage
  misc_difference 33: note = 2'-fluoro modified nucleotide may be attached to trivalent N-Acetylgalactosamine

SEQ ID NO: 1023 - RNA, 33 nt, synthetic construct
  source 1..33: mol_type = other RNA
  misc_difference 1: note = 2'-O-methyl modified nucleotide with phosphorothioate linkage may be modified with 5'-Phosphate
  modified_base 2: mod_base = OTHER; note = 2'-fluoro modified nucleotide with phosphorothioate linkage
  modified_base 3: mod_base = OTHER; note = 2'-O-methyl modified nucleotide
  modified_base 4: mod_base = OTHER; note = 2'-fluoro modified nucleotide
  modified_base 5: mod_base = OTHER; note = 2'-O-methyl modified nucleotide
  modified_base 6: mod_base = OTHER; note = 2'-fluoro modified nucleotide
  modified_base 7: mod_base = OTHER; note = 2'-O-methyl modified nucleotide
  modified_base 8: mod_base = OTHER; note = 2'-fluoro modified nucleotide
  modified_base 9: mod_base = OTHER; note = 2'-O-methyl modified nucleotide
  modified_base 10: mod_base = OTHER; note = 2'-fluoro modified nucleotide
  modified_base 11: mod_base = OTHER; note = 2'-O-methyl modified nucleotide
  modified_base 12: mod_base = OTHER; note = 2'-fluoro modified nucleotide
  modified_base 13: mod_base = OTHER; note = 2'-O-methyl modified nucleotide
  modified_base 14: mod_base = OTHER; note = 2'-fluoro modified nucleotide with phosphorothioate linkage
  modified_base 15: mod_base = OTHER; note = 2'-O-methyl modified nucleotide with phosphorothioate linkage
  modified_base 16: mod_base = OTHER; note = 2'-fluoro modified nucleotide with phosphorothioate linkage
  modified_base 17: mod_base = OTHER; note = 2'-O-methyl modified nucleotide with phosphorothioate linkage
  modified_base 18: mod_base = OTHER; note = 2'-fluoro modified nucleotide with phosphorothioate linkage
  modified_base 19: mod_base = OTHER; note = 2'-O-methyl modified nucleotide with phosphorothioate linkage
  modified_base 20: mod_base = OTHER; note = 2'-O-methyl modified nucleotide
  modified_base 21: mod_base = OTHER; note = 2'-fluoro modified nucleotide
  modified_base 22: mod_base = OTHER; note = 2'-O-methyl modified nucleotide
  modified_base 23: mod_base = OTHER; note = 2'-fluoro modified nucleotide
  modified_base 24: mod_base = OTHER; note = 2'-O-methyl modified nucleotide
  modified_base 25: mod_base = OTHER; note = 2'-fluoro modified nucleotide
  modified_base 26: mod_base = OTHER; note = 2'-O-methyl modified nucleotide
  modified_base 27: mod_base = OTHER; note = 2'-fluoro modified nucleotide
  modified_base 28: mod_base = OTHER; note = 2'-O-methyl modified nucleotide
  modified_base 29: mod_base = OTHER; note = 2'-fluoro modified nucleotide
  modified_base 30: mod_base = OTHER; note = 2'-O-methyl modified nucleotide
  modified_base 31: mod_base = OTHER; note = 2'-fluoro modified nucleotide with phosphorothioate linkage
  modified_base 32: mod_base = OTHER; note = 2'-O-methyl modified nucleotide with phosphorothioate linkage
  misc_difference 33: note = 2'-fluoro modified nucleotide may be attached to trivalent N-Acetylgalactosamine
tataattccaatatgatcaatattggaattata

SEQ ID NO: 1024 - RNA, 33 nt, synthetic construct
  source 1..33: mol_type = other RNA
  misc_difference 1: note = 2'-O-methyl modified nucleotide with phosphorothioate linkage may be modified with 5'-Phosphate
  modified_base 2: mod_base = OTHER; note = 2'-fluoro modified nucleotide with phosphorothioate linkage
  modified_base 3: mod_base = OTHER; note = 2'-O-methyl modified nucleotide
  modified_base 4: mod_base = OTHER; note = 2'-fluoro modified nucleotide
  modified_base 5: mod_base = OTHER; note = 2'-O-methyl modified nucleotide
  modified_base 6: mod_base = OTHER; note = 2'-fluoro modified nucleotide
  modified_base 7: mod_base = OTHER; note = 2'-O-methyl modified nucleotide
  modified_base 8: mod_base = OTHER; note = 2'-fluoro modified nucleotide
  modified_base 9: mod_base = OTHER; note = 2'-O-methyl modified nucleotide
  modified_base 10: mod_base = OTHER; note = 2'-fluoro modified nucleotide
  modified_base 11: mod_base = OTHER; note = 2'-O-methyl modified nucleotide
  modified_base 12: mod_base = OTHER; note = 2'-fluoro modified nucleotide
  modified_base 13: mod_base = OTHER; note = 2'-O-methyl modified nucleotide
  modified_base 14: mod_base = OTHER; note = 2'-fluoro modified nucleotide with phosphorothioate linkage
  modified_base 15: mod_base = OTHER; note = 2'-O-methyl modified nucleotide with phosphorothioate linkage
  modified_base 16: mod_base = OTHER; note = 2'-fluoro modified nucleotide with phosphorothioate linkage
  modified_base 17: mod_base = OTHER; note = 2'-O-methyl modified nucleotide with phosphorothioate linkage
  modified_base 18: mod_base = OTHER; note = 2'-fluoro modified nucleotide with phosphorothioate linkage
  modified_base 19: mod_base = OTHER; note = 2'-O-methyl modified nucleotide with phosphorothioate linkage
  modified_base 20: mod_base = OTHER; note = 2'-O-methyl modified nucleotide
  modified_base 21: mod_base = OTHER; note = 2'-fluoro modified nucleotide
  modified_base 22: mod_base = OTHER; note = 2'-O-methyl modified nucleotide
  modified_base 23: mod_base = OTHER; note = 2'-fluoro modified nucleotide
  modified_base 24: mod_base = OTHER; note = 2'-O-methyl modified nucleotide
  modified_base 25: mod_base = OTHER; note = 2'-fluoro modified nucleotide
  modified_base 26: mod_base = OTHER; note = 2'-O-methyl modified nucleotide
  modified_base 27: mod_base = OTHER; note = 2'-fluoro modified nucleotide
  modified_base 28: mod_base = OTHER; note = 2'-O-methyl modified nucleotide
  modified_base 29: mod_base = OTHER; note = 2'-fluoro modified nucleotide
  modified_base 30: mod_base = OTHER; note = 2'-O-methyl modified nucleotide
  modified_base 31: mod_base = OTHER; note = 2'-fluoro modified nucleotide with phosphorothioate linkage
  modified_base 32: mod_base = OTHER; note = 2'-O-methyl modified nucleotide with phosphorothioate linkage
  misc_difference 33: note = 2'-fluoro modified nucleotide may be attached to trivalent N-Acetylgalactosamine
tgataaatgaacatggcctatgttcatttatca

SEQ ID NO: 1025 - RNA, 33 nt, synthetic construct
  source 1..33: mol_type = other RNA
  misc_difference 1: note = 2'-O-methyl modified nucleotide with phosphorothioate linkage may be modified with 5'-Phosphate
  modified_base 2: mod_base = OTHER; note = 2'-fluoro modified nucleotide with phosphorothioate linkage
  modified_base 3: mod_base = OTHER; note = 2'-O-methyl modified nucleotide
  modified_base 4: mod_base = OTHER; note = 2'-fluoro modified nucleotide
  modified_base 5: mod_base = OTHER; note = 2'-O-methyl modified nucleotide
  modified_base 6: mod_base = OTHER; note = 2'-fluoro modified nucleotide
  modified_base 7: mod_base = OTHER; note = 2'-O-methyl modified nucleotide
  modified_base 8: mod_base = OTHER; note = 2'-fluoro modified nucleotide
  modified_base 9: mod_base = OTHER; note = 2'-O-methyl modified nucleotide
  modified_base 10: mod_base = OTHER; note = 2'-fluoro modified nucleotide
  modified_base 11: mod_base = OTHER; note = 2'-O-methyl modified nucleotide
  modified_base 12: mod_base = OTHER; note = 2'-fluoro modified nucleotide
  modified_base 13: mod_base = OTHER; note = 2'-O-methyl modified nucleotide
  modified_base 14: mod_base = OTHER; note = 2'-fluoro modified nucleotide with phosphorothioate linkage
  modified_base 15: mod_base = OTHER; note = 2'-O-methyl modified nucleotide with phosphorothioate linkage
  modified_base 16: mod_base = OTHER; note = 2'-fluoro modified nucleotide with phosphorothioate linkage
  modified_base 17: mod_base = OTHER; note = 2'-O-methyl modified nucleotide with phosphorothioate linkage
  modified_base 18: mod_base = OTHER; note = 2'-fluoro modified nucleotide with phosphorothioate linkage
  modified_base 19: mod_base = OTHER; note = 2'-O-methyl modified nucleotide with phosphorothioate linkage
  modified_base 20: mod_base = OTHER; note = 2'-O-methyl modified nucleotide
  modified_base 21: mod_base = OTHER; note = 2'-fluoro modified nucleotide
  modified_base 22: mod_base = OTHER; note = 2'-O-methyl modified nucleotide
  modified_base 23: mod_base = OTHER; note = 2'-fluoro modified nucleotide
  modified_base 24: mod_base = OTHER; note = 2'-O-methyl modified nucleotide
  modified_base 25: mod_base = OTHER; note = 2'-fluoro modified nucleotide
  modified_base 26: mod_base = OTHER; note = 2'-O-methyl modified nucleotide
  modified_base 27: mod_base = OTHER; note = 2'-fluoro modified nucleotide
  modified_base 28: mod_base = OTHER; note = 2'-O-methyl modified nucleotide
  modified_base 29: mod_base = OTHER; note = 2'-fluoro modified nucleotide
  modified_base 30: mod_base = OTHER; note = 2'-O-methyl modified nucleotide
  modified_base 31: mod_base = OTHER; note = 2'-fluoro modified nucleotide with phosphorothioate linkage
  modified_base 32: mod_base = OTHER; note = 2'-O-methyl modified nucleotide with phosphorothioate linkage
  misc_difference 33: note = 2'-fluoro modified nucleotide may be attached to trivalent N-Acetylgalactosamine
taaggttcatcattttcttaatgatgaacctta

SEQ ID NO: 1026 - RNA, 33 nt, synthetic construct; identical to SEQ ID NO: 576
  source 1..33: mol_type = other RNA
  misc_difference 1: note = 2'-O-methyl modified nucleotide with phosphorothioate linkage may be modified with 5'-Phosphate
  modified_base 2: mod_base = OTHER; note = 2'-fluoro modified nucleotide with phosphorothioate linkage
  modified_base 3: mod_base = OTHER; note = 2'-O-methyl modified nucleotide
  modified_base 4: mod_base = OTHER; note = 2'-fluoro modified nucleotide
  modified_base 5: mod_base = OTHER; note = 2'-O-methyl modified nucleotide
  modified_base 6: mod_base = OTHER; note = 2'-fluoro modified nucleotide
  modified_base 7: mod_base = OTHER; note = 2'-O-methyl modified nucleotide
  modified_base 8: mod_base = OTHER; note = 2'-fluoro modified nucleotide
  modified_base 9: mod_base = OTHER; note = 2'-O-methyl modified nucleotide
  modified_base 10: mod_base = OTHER; note = 2'-fluoro modified nucleotide
  modified_base 11: mod_base = OTHER; note = 2'-O-methyl modified nucleotide
  modified_base 12: mod_base = OTHER; note = 2'-fluoro modified nucleotide
  modified_base 13: mod_base = OTHER; note = 2'-O-methyl modified nucleotide
  modified_base 14: mod_base = OTHER; note = 2'-fluoro modified nucleotide with phosphorothioate linkage
  modified_base 15: mod_base = OTHER; note = 2'-O-methyl modified nucleotide with phosphorothioate linkage
  modified_base 16: mod_base = OTHER; note = 2'-fluoro modified nucleotide with phosphorothioate linkage
  modified_base 17: mod_base = OTHER; note = 2'-O-methyl modified nucleotide with phosphorothioate linkage
  modified_base 18: mod_base = OTHER; note = 2'-fluoro modified nucleotide with phosphorothioate linkage
  modified_base 19: mod_base = OTHER; note = 2'-O-methyl modified nucleotide with phosphorothioate linkage
  modified_base 20: mod_base = OTHER; note = 2'-O-methyl modified nucleotide
  modified_base 21: mod_base = OTHER; note = 2'-fluoro modified nucleotide
  modified_base 22: mod_base = OTHER; note = 2'-O-methyl modified nucleotide
  modified_base 23: mod_base = OTHER; note = 2'-fluoro modified nucleotide
  modified_base 24: mod_base = OTHER; note = 2'-O-methyl modified nucleotide
  modified_base 25: mod_base = OTHER; note = 2'-fluoro modified nucleotide
  modified_base 26: mod_base = OTHER; note = 2'-O-methyl modified nucleotide
  modified_base 27: mod_base = OTHER; note = 2'-fluoro modified nucleotide
  modified_base 28: mod_base = OTHER; note = 2'-O-methyl modified nucleotide
  modified_base 29: mod_base = OTHER; note = 2'-fluoro modified nucleotide
  modified_base 30: mod_base = OTHER; note = 2'-O-methyl modified nucleotide
  modified_base 31: mod_base = OTHER; note = 2'-fluoro modified nucleotide with phosphorothioate linkage
  modified_base 32: mod_base = OTHER; note = 2'-O-methyl modified nucleotide with phosphorothioate linkage
  misc_difference 33: note = 2'-fluoro modified nucleotide may be attached to trivalent N-Acetylgalactosamine

SEQ ID NO: 1027 - RNA, 33 nt, synthetic construct
  source 1..33: mol_type = other RNA
  misc_difference 1: note = 2'-O-methyl modified nucleotide with phosphorothioate linkage may be modified with 5'-Phosphate
  modified_base 2: mod_base = OTHER; note = 2'-fluoro modified nucleotide with phosphorothioate linkage
  modified_base 3: mod_base = OTHER; note = 2'-O-methyl modified nucleotide
  modified_base 4: mod_base = OTHER; note = 2'-fluoro modified nucleotide
  modified_base 5: mod_base = OTHER; note = 2'-O-methyl modified nucleotide
  modified_base 6: mod_base = OTHER; note = 2'-fluoro modified nucleotide
  modified_base 7: mod_base = OTHER; note = 2'-O-methyl modified nucleotide
  modified_base 8: mod_base = OTHER; note = 2'-fluoro modified nucleotide
  modified_base 9: mod_base = OTHER; note = 2'-O-methyl modified nucleotide
  modified_base 10: mod_base = OTHER; note = 2'-fluoro modified nucleotide
  modified_base 11: mod_base = OTHER; note = 2'-O-methyl modified nucleotide
  modified_base 12: mod_base = OTHER; note = 2'-fluoro modified nucleotide
  modified_base 13: mod_base = OTHER; note = 2'-O-methyl modified nucleotide
  modified_base 14: mod_base = OTHER; note = 2'-fluoro modified nucleotide with phosphorothioate linkage
  modified_base 15: mod_base = OTHER; note = 2'-O-methyl modified nucleotide with phosphorothioate linkage
  modified_base 16: mod_base = OTHER; note = 2'-fluoro modified nucleotide with phosphorothioate linkage
  modified_base 17: mod_base = OTHER; note = 2'-O-methyl modified nucleotide with phosphorothioate linkage
  modified_base 18: mod_base = OTHER; note = 2'-fluoro modified nucleotide with phosphorothioate linkage
  modified_base 19: mod_base = OTHER; note = 2'-O-methyl modified nucleotide with phosphorothioate linkage
  modified_base 20: mod_base = OTHER; note = 2'-O-methyl modified nucleotide
  modified_base 21: mod_base = OTHER; note = 2'-fluoro modified nucleotide
  modified_base 22: mod_base = OTHER; note = 2'-O-methyl modified nucleotide
  modified_base 23: mod_base = OTHER; note = 2'-fluoro modified nucleotide
  modified_base 24: mod_base = OTHER; note = 2'-O-methyl modified nucleotide
  modified_base 25: mod_base = OTHER; note = 2'-fluoro modified nucleotide
  modified_base 26: mod_base = OTHER; note = 2'-O-methyl modified nucleotide
  modified_base 27: mod_base = OTHER; note = 2'-fluoro modified nucleotide
  modified_base 28: mod_base = OTHER; note = 2'-O-methyl modified nucleotide
  modified_base 29: mod_base = OTHER; note = 2'-fluoro modified nucleotide
  modified_base 30: mod_base = OTHER; note = 2'-O-methyl modified nucleotide
  modified_base 31: mod_base = OTHER; note = 2'-fluoro modified nucleotide with phosphorothioate linkage
  modified_base 32: mod_base = OTHER; note = 2'-O-methyl modified nucleotide with phosphorothioate linkage
  misc_difference 33: note = 2'-fluoro modified nucleotide may be attached to trivalent N-Acetylgalactosamine
tcaagtactcttaaagcaattaagagtacttga

SEQ ID NO: 1028 - RNA, 33 nt, synthetic construct; identical to SEQ ID NO: 578
  source 1..33: mol_type = other RNA
  misc_difference 1: note = 2'-O-methyl modified nucleotide with phosphorothioate linkage may be modified with 5'-Phosphate
  modified_base 2: mod_base = OTHER; note = 2'-fluoro modified nucleotide with phosphorothioate linkage
  modified_base 3: mod_base = OTHER; note = 2'-O-methyl modified nucleotide
  modified_base 4: mod_base = OTHER; note = 2'-fluoro modified nucleotide
  modified_base 5: mod_base = OTHER; note = 2'-O-methyl modified nucleotide
  modified_base 6: mod_base = OTHER; note = 2'-fluoro modified nucleotide
  modified_base 7: mod_base = OTHER; note = 2'-O-methyl modified nucleotide
  modified_base 8: mod_base = OTHER; note = 2'-fluoro modified nucleotide
  modified_base 9: mod_base = OTHER; note = 2'-O-methyl modified nucleotide
  modified_base 10: mod_base = OTHER; note = 2'-fluoro modified nucleotide
  modified_base 11: mod_base = OTHER; note = 2'-O-methyl modified nucleotide
  modified_base 12: mod_base = OTHER; note = 2'-fluoro modified nucleotide
  modified_base 13: mod_base = OTHER; note = 2'-O-methyl modified nucleotide
  modified_base 14: mod_base = OTHER; note = 2'-fluoro modified nucleotide with phosphorothioate linkage
  modified_base 15: mod_base = OTHER; note = 2'-O-methyl modified nucleotide with phosphorothioate linkage
  modified_base 16: mod_base = OTHER; note = 2'-fluoro modified nucleotide with phosphorothioate linkage
  modified_base 17: mod_base = OTHER; note = 2'-O-methyl modified nucleotide with phosphorothioate linkage
  modified_base 18: mod_base = OTHER; note = 2'-fluoro modified nucleotide with phosphorothioate linkage
  modified_base 19: mod_base = OTHER; note = 2'-O-methyl modified nucleotide with phosphorothioate linkage
  modified_base 20: mod_base = OTHER; note = 2'-O-methyl modified nucleotide
  modified_base 21: mod_base = OTHER; note = 2'-fluoro modified nucleotide
  modified_base 22: mod_base = OTHER; note = 2'-O-methyl modified nucleotide
  modified_base 23: mod_base = OTHER; note = 2'-fluoro modified nucleotide
  modified_base 24: mod_base = OTHER; note = 2'-O-methyl modified nucleotide
  modified_base 25: mod_base = OTHER; note = 2'-fluoro modified nucleotide
  modified_base 26: mod_base = OTHER; note = 2'-O-methyl modified nucleotide
  modified_base 27: mod_base = OTHER; note = 2'-fluoro modified nucleotide
  modified_base 28: mod_base = OTHER; note = 2'-O-methyl modified nucleotide
  modified_base 29: mod_base = OTHER; note = 2'-fluoro modified nucleotide
  modified_base 30: mod_base = OTHER; note = 2'-O-methyl modified nucleotide
  modified_base 31: mod_base = OTHER; note = 2'-fluoro modified nucleotide with phosphorothioate linkage
  modified_base 32: mod_base = OTHER; note = 2'-O-methyl modified nucleotide with phosphorothioate linkage
  misc_difference 33: note = 2'-fluoro modified nucleotide may be attached to trivalent N-Acetylgalactosamine

SEQ ID NO: 1029 - RNA, 33 nt, synthetic construct; identical to SEQ ID NO: 579
  source 1..33: mol_type = other RNA
  misc_difference 1: note = 2'-O-methyl modified nucleotide with phosphorothioate linkage may be modified with 5'-Phosphate
  modified_base 2: mod_base = OTHER; note = 2'-fluoro modified nucleotide with phosphorothioate linkage
  modified_base 3: mod_base = OTHER; note = 2'-O-methyl modified nucleotide
  modified_base 4: mod_base = OTHER; note = 2'-fluoro modified nucleotide
  modified_base 5: mod_base = OTHER; note = 2'-O-methyl modified nucleotide
  modified_base 6: mod_base = OTHER; note = 2'-fluoro modified nucleotide
  modified_base 7: mod_base = OTHER; note = 2'-O-methyl modified nucleotide
  modified_base 8: mod_base = OTHER; note = 2'-fluoro modified nucleotide
  modified_base 9: mod_base = OTHER; note = 2'-O-methyl modified nucleotide
  modified_base 10: mod_base = OTHER; note = 2'-fluoro modified nucleotide
  modified_base 11: mod_base = OTHER; note = 2'-O-methyl modified nucleotide
  modified_base 12: mod_base = OTHER; note = 2'-fluoro modified nucleotide
  modified_base 13: mod_base = OTHER; note = 2'-O-methyl modified nucleotide
  modified_base 14: mod_base = OTHER; note = 2'-fluoro modified nucleotide with phosphorothioate linkage
  modified_base 15: mod_base = OTHER; note = 2'-O-methyl modified nucleotide with phosphorothioate linkage
  modified_base 16: mod_base = OTHER; note = 2'-fluoro modified nucleotide with phosphorothioate linkage
  modified_base 17: mod_base = OTHER; note = 2'-O-methyl modified nucleotide with phosphorothioate linkage
  modified_base 18: mod_base = OTHER; note = 2'-fluoro modified nucleotide with phosphorothioate linkage
  modified_base 19: mod_base = OTHER; note = 2'-O-methyl modified nucleotide with phosphorothioate linkage
  modified_base 20: mod_base = OTHER; note = 2'-O-methyl modified nucleotide
  modified_base 21: mod_base = OTHER; note = 2'-fluoro modified nucleotide
  modified_base 22: mod_base = OTHER; note = 2'-O-methyl modified nucleotide
  modified_base 23: mod_base = OTHER; note = 2'-fluoro modified nucleotide
  modified_base 24: mod_base = OTHER; note = 2'-O-methyl modified nucleotide
  modified_base 25: mod_base = OTHER; note = 2'-fluoro modified nucleotide
  modified_base 26: mod_base = OTHER; note = 2'-O-methyl modified nucleotide
  modified_base 27: mod_base = OTHER; note = 2'-fluoro modified nucleotide
  modified_base 28: mod_base = OTHER; note = 2'-O-methyl modified nucleotide
  modified_base 29: mod_base = OTHER; note = 2'-fluoro modified nucleotide
  modified_base 30: mod_base = OTHER; note = 2'-O-methyl modified nucleotide
  modified_base 31: mod_base = OTHER; note = 2'-fluoro modified nucleotide with phosphorothioate linkage
  modified_base 32: mod_base = OTHER; note = 2'-O-methyl modified nucleotide with phosphorothioate linkage
  misc_difference 33: note = 2'-fluoro modified nucleotide may be attached to trivalent N-Acetylgalactosamine

SEQ ID NO: 1030 - RNA, 33 nt, synthetic construct
  source 1..33: mol_type = other RNA
  misc_difference 1: note = 2'-O-methyl modified nucleotide with phosphorothioate linkage may be modified with 5'-Phosphate
  modified_base 2: mod_base = OTHER; note = 2'-fluoro modified nucleotide with phosphorothioate linkage
  modified_base 3: mod_base = OTHER; note = 2'-O-methyl modified nucleotide
  modified_base 4: mod_base = OTHER; note = 2'-fluoro modified nucleotide
  modified_base 5: mod_base = OTHER; note = 2'-O-methyl modified nucleotide
  modified_base 6: mod_base = OTHER; note = 2'-fluoro modified nucleotide
  modified_base 7: mod_base = OTHER; note = 2'-O-methyl modified nucleotide
  modified_base 8: mod_base = OTHER; note = 2'-fluoro modified nucleotide
  modified_base 9: mod_base = OTHER; note = 2'-O-methyl modified nucleotide
  modified_base 10: mod_base = OTHER; note = 2'-fluoro modified nucleotide
  modified_base 11: mod_base = OTHER; note = 2'-O-methyl modified nucleotide
  modified_base 12: mod_base = OTHER; note = 2'-fluoro modified nucleotide
  modified_base 13: mod_base = OTHER; note = 2'-O-methyl modified nucleotide
  modified_base 14: mod_base = OTHER; note = 2'-fluoro modified nucleotide with phosphorothioate linkage
  modified_base 15: mod_base = OTHER; note = 2'-O-methyl modified nucleotide with phosphorothioate linkage
  modified_base 16: mod_base = OTHER; note = 2'-fluoro modified nucleotide with phosphorothioate linkage
  modified_base 17: mod_base = OTHER; note = 2'-O-methyl modified nucleotide with phosphorothioate linkage
  modified_base 18: mod_base = OTHER; note = 2'-fluoro modified nucleotide with phosphorothioate linkage
  modified_base 19: mod_base = OTHER; note = 2'-O-methyl modified nucleotide with phosphorothioate linkage
  modified_base 20: mod_base = OTHER; note = 2'-O-methyl modified nucleotide
  modified_base 21: mod_base = OTHER; note = 2'-fluoro modified nucleotide
  modified_base 22: mod_base = OTHER; note = 2'-O-methyl modified nucleotide
  modified_base 23: mod_base = OTHER; note = 2'-fluoro modified nucleotide
  modified_base 24: mod_base = OTHER; note = 2'-O-methyl modified nucleotide
  modified_base 25: mod_base = OTHER; note = 2'-fluoro modified nucleotide
  modified_base 26: mod_base = OTHER; note = 2'-O-methyl modified nucleotide
  modified_base 27: mod_base = OTHER; note = 2'-fluoro modified nucleotide
  modified_base 28: mod_base = OTHER; note = 2'-O-methyl modified nucleotide
  modified_base 29: mod_base = OTHER; note = 2'-fluoro modified nucleotide
  modified_base 30: mod_base = OTHER; note = 2'-O-methyl modified nucleotide
  modified_base 31: mod_base = OTHER; note = 2'-fluoro modified nucleotide with phosphorothioate linkage
  modified_base 32: mod_base = OTHER; note = 2'-O-methyl modified nucleotide with phosphorothioate linkage
  misc_difference 33: note = 2'-fluoro modified nucleotide may be attached to trivalent N-Acetylgalactosamine
taacaagatgaacttcccaagttcatcttgtta

SEQ ID NO: 1031 - RNA, 33 nt, synthetic construct; identical to SEQ ID NO: 581
  source 1..33: mol_type = other RNA
  misc_difference 1: note = 2'-O-methyl modified nucleotide with phosphorothioate linkage may be modified with 5'-Phosphate
  modified_base 2: mod_base = OTHER; note = 2'-fluoro modified nucleotide with phosphorothioate linkage
  modified_base 3: mod_base = OTHER; note = 2'-O-methyl modified nucleotide
  modified_base 4: mod_base = OTHER; note = 2'-fluoro modified nucleotide
  modified_base 5: mod_base = OTHER; note = 2'-O-methyl modified nucleotide
  modified_base 6: mod_base = OTHER; note = 2'-fluoro modified nucleotide
  modified_base 7: mod_base = OTHER; note = 2'-O-methyl modified nucleotide
  modified_base 8: mod_base = OTHER; note = 2'-fluoro modified nucleotide
  modified_base 9: mod_base = OTHER; note = 2'-O-methyl modified nucleotide
  modified_base 10: mod_base = OTHER; note = 2'-fluoro modified nucleotide
  modified_base 11: mod_base = OTHER; note = 2'-O-methyl modified nucleotide
  modified_base 12: mod_base = OTHER; note = 2'-fluoro modified nucleotide
  modified_base 13: mod_base = OTHER; note = 2'-O-methyl modified nucleotide
  modified_base 14: mod_base = OTHER; note = 2'-fluoro modified nucleotide with phosphorothioate linkage
  modified_base 15: mod_base = OTHER; note = 2'-O-methyl modified nucleotide with phosphorothioate linkage
  modified_base 16: mod_base = OTHER; note = 2'-fluoro modified nucleotide with phosphorothioate linkage
  modified_base 17: mod_base = OTHER; note = 2'-O-methyl modified nucleotide with phosphorothioate linkage
  modified_base 18: mod_base = OTHER; note = 2'-fluoro modified nucleotide with phosphorothioate linkage
  modified_base 19: mod_base = OTHER; note = 2'-O-methyl modified nucleotide with phosphorothioate linkage
  modified_base 20: mod_base = OTHER; note = 2'-O-methyl modified nucleotide
  modified_base 21: mod_base = OTHER; note = 2'-fluoro modified nucleotide
  modified_base 22: mod_base = OTHER; note = 2'-O-methyl modified nucleotide
  modified_base 23: mod_base = OTHER; note = 2'-fluoro modified nucleotide
  modified_base 24: mod_base = OTHER; note = 2'-O-methyl modified nucleotide
  modified_base 25: mod_base = OTHER; note = 2'-fluoro modified nucleotide
  modified_base 26: mod_base = OTHER; note = 2'-O-methyl modified nucleotide
  modified_base 27: mod_base = OTHER; note = 2'-fluoro modified nucleotide
  modified_base 28: mod_base = OTHER; note = 2'-O-methyl modified nucleotide
  modified_base 29: mod_base = OTHER; note = 2'-fluoro modified nucleotide
  modified_base 30: mod_base = OTHER; note = 2'-O-methyl modified nucleotide
  modified_base 31: mod_base = OTHER; note = 2'-fluoro modified nucleotide with phosphorothioate linkage
  modified_base 32: mod_base = OTHER; note = 2'-O-methyl modified nucleotide with phosphorothioate linkage
  misc_difference 33: note = 2'-fluoro modified nucleotide may be attached to trivalent N-Acetylgalactosamine

SEQ ID NO: 1032 - RNA, 33 nt, synthetic construct
  source 1..33: mol_type = other RNA
  misc_difference 1: note = 2'-O-methyl modified nucleotide with phosphorothioate linkage may be modified with 5'-Phosphate
  modified_base 2: mod_base = OTHER; note = 2'-fluoro modified nucleotide with phosphorothioate linkage
  modified_base 3: mod_base = OTHER; note = 2'-O-methyl modified nucleotide
  modified_base 4: mod_base = OTHER; note = 2'-fluoro modified nucleotide
  modified_base 5: mod_base = OTHER; note = 2'-O-methyl modified nucleotide
  modified_base 6: mod_base = OTHER; note = 2'-fluoro modified nucleotide
  modified_base 7: mod_base = OTHER; note = 2'-O-methyl modified nucleotide
  modified_base 8: mod_base = OTHER; note = 2'-fluoro modified nucleotide
  modified_base 9: mod_base = OTHER; note = 2'-O-methyl modified nucleotide
  modified_base 10: mod_base = OTHER; note = 2'-fluoro modified nucleotide
  modified_base 11: mod_base = OTHER; note = 2'-O-methyl modified nucleotide
  modified_base 12: mod_base = OTHER; note = 2'-fluoro modified nucleotide
  modified_base 13: mod_base = OTHER; note = 2'-O-methyl modified nucleotide
  modified_base 14: mod_base = OTHER; note = 2'-fluoro modified nucleotide with phosphorothioate linkage
  modified_base 15: mod_base = OTHER; note = 2'-O-methyl modified nucleotide with phosphorothioate linkage
  modified_base 16: mod_base = OTHER; note = 2'-fluoro modified nucleotide with phosphorothioate linkage
  modified_base 17: mod_base = OTHER; note = 2'-O-methyl modified nucleotide with phosphorothioate linkage
  modified_base 18: mod_base = OTHER; note = 2'-fluoro modified nucleotide with phosphorothioate linkage
  modified_base 19: mod_base = OTHER; note = 2'-O-methyl modified nucleotide with phosphorothioate linkage
  modified_base 20: mod_base = OTHER; note = 2'-O-methyl modified nucleotide
  modified_base 21: mod_base = OTHER; note = 2'-fluoro modified nucleotide
  modified_base 22: mod_base = OTHER; note = 2'-O-methyl modified nucleotide
  modified_base 23: mod_base = OTHER; note = 2'-fluoro modified nucleotide
  modified_base 24: mod_base = OTHER; note = 2'-O-methyl modified nucleotide
  modified_base 25: mod_base = OTHER; note = 2'-fluoro modified nucleotide
  modified_base 26: mod_base = OTHER; note = 2'-O-methyl modified nucleotide
  modified_base 27: mod_base = OTHER; note = 2'-fluoro modified nucleotide
  modified_base 28: mod_base = OTHER; note = 2'-O-methyl modified nucleotide
  modified_base 29: mod_base = OTHER; note = 2'-fluoro modified nucleotide
  modified_base 30: mod_base = OTHER; note = 2'-O-methyl modified nucleotide
  modified_base 31: mod_base = OTHER; note = 2'-fluoro modified nucleotide with phosphorothioate linkage
  modified_base 32: mod_base = OTHER; note = 2'-O-methyl modified nucleotide with phosphorothioate linkage
  misc_difference 33: note = 2'-fluoro modified nucleotide may be attached to trivalent N-Acetylgalactosamine
tagtcttctcttattccaaataagagaagacta

SEQ ID NO: 1033 - RNA, 33 nt, synthetic construct
  source 1..33: mol_type = other RNA
  misc_difference 1: note = 2'-O-methyl modified nucleotide with phosphorothioate linkage may be modified with 5'-Phosphate
  modified_base 2: mod_base = OTHER; note = 2'-fluoro modified nucleotide with phosphorothioate linkage
  modified_base 3: mod_base = OTHER; note = 2'-O-methyl modified nucleotide
  modified_base 4: mod_base = OTHER; note = 2'-fluoro modified nucleotide
  modified_base 5: mod_base = OTHER; note = 2'-O-methyl modified nucleotide
  modified_base 6: mod_base = OTHER; note = 2'-fluoro modified nucleotide
  modified_base 7: mod_base = OTHER; note = 2'-O-methyl modified nucleotide
  modified_base 8: mod_base = OTHER; note = 2'-fluoro modified nucleotide
  modified_base 9: mod_base = OTHER; note = 2'-O-methyl modified nucleotide
  modified_base 10: mod_base = OTHER; note = 2'-fluoro modified nucleotide
  modified_base 11: mod_base = OTHER; note = 2'-O-methyl modified nucleotide
  modified_base 12: mod_base = OTHER; note = 2'-fluoro modified nucleotide
  modified_base 13: mod_base = OTHER; note = 2'-O-methyl modified nucleotide
  modified_base 14: mod_base = OTHER; note = 2'-fluoro modified nucleotide with phosphorothioate linkage
  modified_base 15: mod_base = OTHER; note = 2'-O-methyl modified nucleotide with phosphorothioate linkage
  modified_base 16: mod_base = OTHER; note = 2'-fluoro modified nucleotide with phosphorothioate linkage
  modified_base 17: mod_base = OTHER; note = 2'-O-methyl modified nucleotide with phosphorothioate linkage
  modified_base 18: mod_base = OTHER; note = 2'-fluoro modified nucleotide with phosphorothioate linkage
  modified_base 19: mod_base = OTHER; note = 2'-O-methyl modified nucleotide with phosphorothioate linkage
  modified_base 20: mod_base = OTHER; note = 2'-O-methyl modified nucleotide
  modified_base 21: mod_base = OTHER; note = 2'-fluoro modified nucleotide
  modified_base 22: mod_base = OTHER; note = 2'-O-methyl modified nucleotide
  modified_base 23: mod_base = OTHER; note = 2'-fluoro modified nucleotide
  modified_base 24: mod_base = OTHER; note = 2'-O-methyl modified nucleotide
  modified_base 25: mod_base = OTHER; note = 2'-fluoro modified nucleotide
  modified_base 26: mod_base = OTHER; note = 2'-O-methyl modified nucleotide
  modified_base 27: mod_base = OTHER; note = 2'-fluoro modified nucleotide
  modified_base 28: mod_base = OTHER; note = 2'-O-methyl modified nucleotide
  modified_base 29: mod_base = OTHER; note = 2'-fluoro modified nucleotide
  modified_base 30: mod_base = OTHER; note = 2'-O-methyl modified nucleotide
  modified_base 31: mod_base = OTHER; note = 2'-fluoro modified nucleotide with phosphorothioate linkage
  modified_base 32: mod_base = OTHER; note = 2'-O-methyl modified nucleotide with phosphorothioate linkage
  misc_difference 33: note = 2'-fluoro modified nucleotide may be attached to trivalent N-Acetylgalactosamine
taatgtttatactttgataaagtataaacatta

SEQ ID NO: 1034 - RNA, 33 nt, synthetic construct
  source 1..33: mol_type = other RNA
  misc_difference 1: note = 2'-O-methyl modified nucleotide with phosphorothioate linkage may be modified with 5'-Phosphate
  modified_base 2: mod_base = OTHER; note = 2'-fluoro modified nucleotide with phosphorothioate linkage
  modified_base 3: mod_base = OTHER; note = 2'-O-methyl modified nucleotide
  modified_base 4: mod_base = OTHER; note = 2'-fluoro modified nucleotide
  modified_base 5: mod_base = OTHER; note = 2'-O-methyl modified nucleotide
  modified_base 6: mod_base = OTHER; note = 2'-fluoro modified nucleotide
  modified_base 7: mod_base = OTHER; note = 2'-O-methyl modified nucleotide
  modified_base 8: mod_base = OTHER; note = 2'-fluoro modified nucleotide
  modified_base 9: mod_base = OTHER; note = 2'-O-methyl modified nucleotide
  modified_base 10: mod_base = OTHER; note = 2'-fluoro modified nucleotide
  modified_base 11: mod_base = OTHER; note = 2'-O-methyl modified nucleotide
  modified_base 12: mod_base = OTHER; note = 2'-fluoro modified nucleotide
  modified_base 13: mod_base = OTHER; note = 2'-O-methyl modified nucleotide
  modified_base 14: mod_base = OTHER; note = 2'-fluoro modified nucleotide with phosphorothioate linkage
  modified_base 15: mod_base = OTHER; note = 2'-O-methyl modified nucleotide with phosphorothioate linkage
  modified_base 16: mod_base = OTHER; note = 2'-fluoro modified nucleotide with phosphorothioate linkage
  modified_base 17: mod_base = OTHER; note = 2'-O-methyl modified nucleotide with phosphorothioate linkage
  modified_base 18: mod_base = OTHER; note = 2'-fluoro modified nucleotide with phosphorothioate linkage
  modified_base 19: mod_base = OTHER; note = 2'-O-methyl modified nucleotide with phosphorothioate linkage
  modified_base 20: mod_base = OTHER; note = 2'-O-methyl modified nucleotide
  modified_base 21: mod_base = OTHER; note = 2'-fluoro modified nucleotide
  modified_base 22: mod_base = OTHER; note = 2'-O-methyl modified nucleotide
  modified_base 23: mod_base = OTHER; note = 2'-fluoro modified nucleotide
  modified_base 24: mod_base = OTHER; note = 2'-O-methyl modified nucleotide
  modified_base 25: mod_base = OTHER; note = 2'-fluoro modified nucleotide
  modified_base 26: mod_base = OTHER; note = 2'-O-methyl modified nucleotide
  modified_base 27: mod_base = OTHER; note = 2'-fluoro modified nucleotide
  modified_base 28: mod_base = OTHER; note = 2'-O-methyl modified nucleotide
  modified_base 29: mod_base = OTHER; note = 2'-fluoro modified nucleotide
  modified_base 30: mod_base = OTHER; note = 2'-O-methyl modified nucleotide
  modified_base 31: mod_base = OTHER; note = 2'-fluoro modified nucleotide with phosphorothioate linkage
  modified_base 32: mod_base = OTHER; note = 2'-O-methyl modified nucleotide with phosphorothioate linkage
  misc_difference 33: note = 2'-fluoro modified nucleotide may be attached to trivalent N-Acetylgalactosamine
tcggaatcgtacacaaagggtgtacgattccga

SEQ ID NO: 1035 - RNA, 33 nt, synthetic construct
  source 1..33: mol_type = other RNA
  misc_difference 1: note = 2'-O-methyl modified nucleotide with phosphorothioate linkage may be modified with 5'-Phosphate
  modified_base 2: mod_base = OTHER; note = 2'-fluoro modified nucleotide with phosphorothioate linkage
  modified_base 3: mod_base = OTHER; note = 2'-O-methyl modified nucleotide
  modified_base 4: mod_base = OTHER; note = 2'-fluoro modified nucleotide
  modified_base 5: mod_base = OTHER; note = 2'-O-methyl modified nucleotide
  modified_base 6: mod_base = OTHER; note = 2'-fluoro modified nucleotide
  modified_base 7: mod_base = OTHER; note = 2'-O-methyl modified nucleotide
  modified_base 8: mod_base = OTHER; note = 2'-fluoro modified nucleotide
  modified_base 9: mod_base = OTHER; note = 2'-O-methyl modified nucleotide
  modified_base 10: mod_base = OTHER; note = 2'-fluoro modified nucleotide
  modified_base 11: mod_base = OTHER; note = 2'-O-methyl modified nucleotide
  modified_base 12: mod_base = OTHER; note = 2'-fluoro modified nucleotide
  modified_base 13: mod_base = OTHER; note = 2'-O-methyl modified nucleotide
  modified_base 14: mod_base = OTHER; note = 2'-fluoro modified nucleotide with phosphorothioate linkage
  modified_base 15: mod_base = OTHER; note = 2'-O-methyl modified nucleotide with phosphorothioate linkage
  modified_base 16: mod_base = OTHER; note = 2'-fluoro modified nucleotide with phosphorothioate linkage
  modified_base 17: mod_base = OTHER; note = 2'-O-methyl modified nucleotide with phosphorothioate linkage
  modified_base 18: mod_base = OTHER; note = 2'-fluoro modified nucleotide with phosphorothioate linkage
  modified_base 19: mod_base = OTHER; note = 2'-O-methyl modified nucleotide with phosphorothioate linkage
  modified_base 20: mod_base = OTHER; note = 2'-O-methyl modified nucleotide
  modified_base 21: mod_base = OTHER; note = 2'-fluoro modified nucleotide
  modified_base 22: mod_base = OTHER; note = 2'-O-methyl modified nucleotide
  modified_base 23: mod_base = OTHER; note = 2'-fluoro modified nucleotide
  modified_base 24: mod_base = OTHER; note = 2'-O-methyl modified nucleotide
  modified_base 25: mod_base = OTHER; note = 2'-fluoro modified nucleotide
  modified_base 26: mod_base = OTHER; note = 2'-O-methyl modified nucleotide
  modified_base 27: mod_base = OTHER; note = 2'-fluoro modified nucleotide
  modified_base 28: mod_base = OTHER; note = 2'-O-methyl modified nucleotide
  modified_base 29: mod_base = OTHER; note = 2'-fluoro modified nucleotide
  modified_base 30: mod_base = OTHER; note = 2'-O-methyl modified nucleotide
  modified_base 31: mod_base = OTHER; note = 2'-fluoro modified nucleotide with phosphorothioate linkage
  modified_base 32: mod_base = OTHER; note = 2'-O-methyl modified nucleotide with phosphorothioate linkage
  misc_difference 33: note = 2'-fluoro modified nucleotide may be attached to trivalent N-Acetylgalactosamine
tatacctctgctcttctgaagagcagaggtata

SEQ ID NO: 1036 - RNA, 33 nt, synthetic construct
  source 1..33: mol_type = other RNA
  misc_difference 1: note = 2'-O-methyl modified nucleotide with phosphorothioate linkage may be modified with 5'-Phosphate
  modified_base 2: mod_base = OTHER; note = 2'-fluoro modified nucleotide with phosphorothioate linkage
  modified_base 3: mod_base = OTHER; note = 2'-O-methyl modified nucleotide
  modified_base 4: mod_base = OTHER; note = 2'-fluoro modified nucleotide
  modified_base 5: mod_base = OTHER; note = 2'-O-methyl modified nucleotide
  modified_base 6: mod_base = OTHER; note = 2'-fluoro modified nucleotide
  modified_base 7: mod_base = OTHER; note = 2'-O-methyl modified nucleotide
  modified_base 8: mod_base = OTHER; note = 2'-fluoro modified nucleotide
  modified_base 9: mod_base = OTHER; note = 2'-O-methyl modified nucleotide
  modified_base 10: mod_base = OTHER; note = 2'-fluoro modified nucleotide
  modified_base 11: mod_base = OTHER; note = 2'-O-methyl modified nucleotide
  modified_base 12: mod_base = OTHER; note = 2'-fluoro modified nucleotide
  modified_base 13: mod_base = OTHER; note = 2'-O-methyl modified nucleotide
  modified_base 14: mod_base = OTHER; note = 2'-fluoro modified nucleotide with phosphorothioate linkage
  modified_base 15: mod_base = OTHER; note = 2'-O-methyl modified nucleotide with phosphorothioate linkage
  modified_base 16: mod_base = OTHER; note = 2'-fluoro modified nucleotide with phosphorothioate linkage
  modified_base 17: mod_base = OTHER; note = 2'-O-methyl modified nucleotide with phosphorothioate linkage
  modified_base 18: mod_base = OTHER; note = 2'-fluoro modified nucleotide with phosphorothioate linkage
  modified_base 19: mod_base = OTHER; note = 2'-O-methyl modified nucleotide with phosphorothioate linkage
  modified_base 20: mod_base = OTHER; note = 2'-O-methyl modified nucleotide
  modified_base 21: mod_base = OTHER; note = 2'-fluoro modified nucleotide
  modified_base 22: mod_base = OTHER; note = 2'-O-methyl modified nucleotide
  modified_base 23: mod_base = OTHER; note = 2'-fluoro modified nucleotide
  modified_base 24: mod_base = OTHER; note = 2'-O-methyl modified nucleotide
  modified_base 25: mod_base = OTHER; note = 2'-fluoro modified nucleotide
  modified_base 26: mod_base = OTHER; note = 2'-O-methyl modified nucleotide
  modified_base 27: mod_base = OTHER; note = 2'-fluoro modified nucleotide
  modified_base 28: mod_base = OTHER; note = 2'-O-methyl modified nucleotide
  modified_base 29: mod_base = OTHER; note = 2'-fluoro modified nucleotide
  modified_base 30: mod_base = OTHER; note = 2'-O-methyl modified nucleotide
  modified_base 31: mod_base = OTHER; note = 2'-fluoro modified nucleotide with phosphorothioate linkage
  modified_base 32: mod_base = OTHER; note = 2'-O-methyl modified nucleotide with phosphorothioate linkage
  misc_difference 33: note = 2'-fluoro modified nucleotide may be attached to trivalent N-Acetylgalactosamine
tatcaatttcttctaccatagaagaaattgata

SEQ ID NO: 1037 - RNA, 33 nt, synthetic construct
  source 1..33: mol_type = other RNA
  misc_difference 1: note = 2'-O-methyl modified nucleotide with phosphorothioate linkage may be modified with 5'-Phosphate
  modified_base 2: mod_base = OTHER; note = 2'-fluoro modified nucleotide with phosphorothioate linkage
  modified_base 3: mod_base = OTHER; note = 2'-O-methyl modified nucleotide
  modified_base 4: mod_base = OTHER; note = 2'-fluoro modified nucleotide
  modified_base 5: mod_base = OTHER; note = 2'-O-methyl modified nucleotide
  modified_base 6: mod_base = OTHER; note = 2'-fluoro modified nucleotide
  modified_base 7: mod_base = OTHER; note = 2'-O-methyl modified nucleotide
  modified_base 8: mod_base = OTHER; note = 2'-fluoro modified nucleotide
  modified_base 9: mod_base = OTHER; note = 2'-O-methyl modified nucleotide
  modified_base 10: mod_base = OTHER; note = 2'-fluoro modified nucleotide
  modified_base 11: mod_base = OTHER; note = 2'-O-methyl modified nucleotide
  modified_base 12: mod_base = OTHER; note = 2'-fluoro modified nucleotide
  modified_base 13: mod_base = OTHER; note = 2'-O-methyl modified nucleotide
  modified_base 14: mod_base = OTHER; note = 2'-fluoro modified nucleotide with phosphorothioate linkage
  modified_base 15: mod_base = OTHER; note = 2'-O-methyl modified nucleotide with phosphorothioate linkage
  modified_base 16: mod_base = OTHER; note = 2'-fluoro modified nucleotide with phosphorothioate linkage
  modified_base 17: mod_base = OTHER; note = 2'-O-methyl modified nucleotide with phosphorothioate linkage
  modified_base 18: mod_base = OTHER; note = 2'-fluoro modified nucleotide with phosphorothioate linkage
  modified_base 19: mod_base = OTHER; note = 2'-O-methyl modified nucleotide with phosphorothioate linkage
  modified_base 20: mod_base = OTHER; note = 2'-O-methyl modified nucleotide
  modified_base 21: mod_base = OTHER; note = 2'-fluoro modified nucleotide
  modified_base 22: mod_base = OTHER; note = 2'-O-methyl modified nucleotide
  modified_base 23: mod_base = OTHER; note = 2'-fluoro modified nucleotide
  modified_base 24: mod_base = OTHER; note = 2'-O-methyl modified nucleotide
  modified_base 25: mod_base = OTHER; note = 2'-fluoro modified nucleotide
  modified_base 26: mod_base = OTHER; note = 2'-O-methyl modified nucleotide
  modified_base 27: mod_base = OTHER; note = 2'-fluoro modified nucleotide
  modified_base 28: mod_base = OTHER; note = 2'-O-methyl modified nucleotide
  modified_base 29: mod_base = OTHER; note = 2'-fluoro modified nucleotide
  modified_base 30: mod_base = OTHER; note = 2'-O-methyl modified nucleotide
  modified_base 31: mod_base = OTHER; note = 2'-fluoro modified nucleotide with phosphorothioate linkage
  modified_base 32: mod_base = OTHER; note = 2'-O-methyl modified nucleotide with phosphorothioate linkage
  misc_difference 33: note = 2'-fluoro modified nucleotide may be attached to trivalent N-Acetylgalactosamine
taacattgtgttttgcattaaaacacaatgtta

SEQ ID NO: 1038 - RNA, 33 nt, synthetic construct; identical to SEQ ID NO: 588
  source 1..33: mol_type = other RNA
  misc_difference 1: note = 2'-O-methyl modified nucleotide with phosphorothioate linkage may be modified with 5'-Phosphate
  modified_base 2: mod_base = OTHER; note = 2'-fluoro modified nucleotide with phosphorothioate linkage
  modified_base 3: mod_base = OTHER; note = 2'-O-methyl modified nucleotide
  modified_base 4: mod_base = OTHER; note = 2'-fluoro modified nucleotide
  modified_base 5: mod_base = OTHER; note = 2'-O-methyl modified nucleotide
  modified_base 6: mod_base = OTHER; note = 2'-fluoro modified nucleotide
  modified_base 7: mod_base = OTHER; note = 2'-O-methyl modified nucleotide
  modified_base 8: mod_base = OTHER; note = 2'-fluoro modified nucleotide
  modified_base 9: mod_base = OTHER; note = 2'-O-methyl modified nucleotide
  modified_base 10: mod_base = OTHER; note = 2'-fluoro modified nucleotide
  modified_base 11: mod_base = OTHER; note = 2'-O-methyl modified nucleotide
  modified_base 12: mod_base = OTHER; note = 2'-fluoro modified nucleotide
  modified_base 13: mod_base = OTHER; note = 2'-O-methyl modified nucleotide
  modified_base 14: mod_base = OTHER; note = 2'-fluoro modified nucleotide with phosphorothioate linkage
  modified_base 15: mod_base = OTHER; note = 2'-O-methyl modified nucleotide with phosphorothioate linkage
  modified_base 16: mod_base = OTHER; note = 2'-fluoro modified nucleotide with phosphorothioate linkage
  modified_base 17: mod_base = OTHER; note = 2'-O-methyl modified nucleotide with phosphorothioate linkage
  modified_base 18: mod_base = OTHER; note = 2'-fluoro modified nucleotide with phosphorothioate linkage
  modified_base 19: mod_base = OTHER; note = 2'-O-methyl modified nucleotide with phosphorothioate linkage
  modified_base 20: mod_base = OTHER; note = 2'-O-methyl modified nucleotide
  modified_base 21: mod_base = OTHER; note = 2'-fluoro modified nucleotide
  modified_base 22: mod_base = OTHER; note = 2'-O-methyl modified nucleotide
  modified_base 23: mod_base = OTHER; note = 2'-fluoro modified nucleotide
  modified_base 24: mod_base = OTHER; note = 2'-O-methyl modified nucleotide
  modified_base 25: mod_base = OTHER; note = 2'-fluoro modified nucleotide
  modified_base 26: mod_base = OTHER; note = 2'-O-methyl modified nucleotide
  modified_base 27: mod_base = OTHER; note = 2'-fluoro modified nucleotide
  modified_base 28: mod_base = OTHER; note = 2'-O-methyl modified nucleotide
  modified_base 29: mod_base = OTHER; note = 2'-fluoro modified nucleotide
  modified_base 30: mod_base = OTHER; note = 2'-O-methyl modified nucleotide
  modified_base 31: mod_base = OTHER; note = 2'-fluoro modified nucleotide with phosphorothioate linkage
  modified_base 32: mod_base = OTHER; note = 2'-O-methyl modified nucleotide with phosphorothioate linkage
  misc_difference 33: note = 2'-fluoro modified nucleotide may be attached to trivalent N-Acetylgalactosamine

SEQ ID NO: 1039 - RNA, 33 nt, synthetic construct
  source 1..33: mol_type = other RNA
  misc_difference 1: note = 2'-O-methyl modified nucleotide with phosphorothioate linkage may be modified with 5'-Phosphate
  modified_base 2: mod_base = OTHER; note = 2'-fluoro modified nucleotide with phosphorothioate linkage
  modified_base 3: mod_base = OTHER; note = 2'-O-methyl modified nucleotide
  modified_base 4: mod_base = OTHER; note = 2'-fluoro modified nucleotide
  modified_base 5: mod_base = OTHER; note = 2'-O-methyl modified nucleotide
  modified_base 6: mod_base = OTHER; note = 2'-fluoro modified nucleotide
  modified_base 7: mod_base = OTHER; note = 2'-O-methyl modified nucleotide
  modified_base 8: mod_base = OTHER; note = 2'-fluoro modified nucleotide
  modified_base 9: mod_base = OTHER; note = 2'-O-methyl modified nucleotide
  modified_base 10: mod_base = OTHER; note = 2'-fluoro modified nucleotide
  modified_base 11: mod_base = OTHER; note = 2'-O-methyl modified nucleotide
  modified_base 12: mod_base = OTHER; note = 2'-fluoro modified nucleotide
  modified_base 13: mod_base = OTHER; note = 2'-O-methyl modified nucleotide
  modified_base 14: mod_base = OTHER; note = 2'-fluoro modified nucleotide with phosphorothioate linkage
  modified_base 15: mod_base = OTHER; note = 2'-O-methyl modified nucleotide with phosphorothioate linkage
  modified_base 16: mod_base = OTHER; note = 2'-fluoro modified nucleotide with phosphorothioate linkage
  modified_base 17: mod_base = OTHER; note = 2'-O-methyl modified nucleotide with phosphorothioate linkage
  modified_base 18: mod_base = OTHER; note = 2'-fluoro modified nucleotide with phosphorothioate linkage
  modified_base 19: mod_base = OTHER; note = 2'-O-methyl modified nucleotide with phosphorothioate linkage
  modified_base 20: mod_base = OTHER; note = 2'-O-methyl modified nucleotide
  modified_base 21: mod_base = OTHER; note = 2'-fluoro modified nucleotide
  modified_base 22: mod_base = OTHER; note = 2'-O-methyl modified nucleotide
  modified_base 23: mod_base = OTHER; note = 2'-fluoro modified nucleotide
  modified_base 24: mod_base = OTHER; note = 2'-O-methyl modified nucleotide
  modified_base 25: mod_base = OTHER; note = 2'-fluoro modified nucleotide
  modified_base 26: mod_base = OTHER; note = 2'-O-methyl modified nucleotide
  modified_base 27: mod_base = OTHER; note = 2'-fluoro modified nucleotide
  modified_base 28: mod_base = OTHER; note = 2'-O-methyl modified nucleotide
  modified_base 29: mod_base = OTHER; note = 2'-fluoro modified nucleotide
  modified_base 30: mod_base = OTHER; note = 2'-O-methyl modified nucleotide
  modified_base 31: mod_base = OTHER; note = 2'-fluoro modified nucleotide with phosphorothioate linkage
  modified_base 32: mod_base = OTHER; note = 2'-O-methyl modified nucleotide with phosphorothioate linkage
  misc_difference 33: note = 2'-fluoro modified nucleotide may be attached to trivalent N-Acetylgalactosamine
taggataacttttaatagataaaagttatccta

SEQ ID NO: 1040 - RNA, 33 nt, synthetic construct; identical to SEQ ID NO: 590
  source 1..33: mol_type = other RNA
  misc_difference 1: note = 2'-O-methyl modified nucleotide with phosphorothioate linkage may be modified with 5'-Phosphate
  modified_base 2: mod_base = OTHER; note = 2'-fluoro modified nucleotide with phosphorothioate linkage
  modified_base 3: mod_base = OTHER; note = 2'-O-methyl modified nucleotide
  modified_base 4: mod_base = OTHER; note = 2'-fluoro modified nucleotide
  modified_base 5: mod_base = OTHER; note = 2'-O-methyl modified nucleotide
  modified_base 6: mod_base = OTHER; note = 2'-fluoro modified nucleotide
  modified_base 7: mod_base = OTHER; note = 2'-O-methyl modified nucleotide
  modified_base 8: mod_base = OTHER; note = 2'-fluoro modified nucleotide
  modified_base 9: mod_base = OTHER; note = 2'-O-methyl modified nucleotide
  modified_base 10: mod_base = OTHER; note = 2'-fluoro modified nucleotide
  modified_base 11: mod_base = OTHER; note = 2'-O-methyl modified nucleotide
  modified_base 12: mod_base = OTHER; note = 2'-fluoro modified nucleotide
  modified_base 13: mod_base = OTHER; note = 2'-O-methyl modified nucleotide
  modified_base 14: mod_base = OTHER; note = 2'-fluoro modified nucleotide with phosphorothioate linkage
  modified_base 15: mod_base = OTHER; note = 2'-O-methyl modified nucleotide with phosphorothioate linkage
  modified_base 16: mod_base = OTHER; note = 2'-fluoro modified nucleotide with phosphorothioate linkage
  modified_base 17: mod_base = OTHER; note = 2'-O-methyl modified nucleotide with phosphorothioate linkage
  modified_base 18: mod_base = OTHER; note = 2'-fluoro modified nucleotide with phosphorothioate linkage
  modified_base 19: mod_base = OTHER; note = 2'-O-methyl modified nucleotide with phosphorothioate linkage
  modified_base 20: mod_base = OTHER; note = 2'-O-methyl modified nucleotide
  modified_base 21: mod_base = OTHER; note = 2'-fluoro modified nucleotide
  modified_base 22: mod_base = OTHER; note = 2'-O-methyl modified nucleotide
  modified_base 23: mod_base = OTHER; note = 2'-fluoro modified nucleotide
  modified_base 24: mod_base = OTHER; note = 2'-O-methyl modified nucleotide
  modified_base 25: mod_base = OTHER; note = 2'-fluoro modified nucleotide
  modified_base 26: mod_base = OTHER; note = 2'-O-methyl modified nucleotide
  modified_base 27: mod_base = OTHER; note = 2'-fluoro modified nucleotide
  modified_base 28: mod_base = OTHER; note = 2'-O-methyl modified nucleotide
  modified_base 29: mod_base = OTHER; note = 2'-fluoro modified nucleotide
  modified_base 30: mod_base = OTHER; note = 2'-O-methyl modified nucleotide
  modified_base 31: mod_base = OTHER; note = 2'-fluoro modified nucleotide with phosphorothioate linkage
  modified_base 32: mod_base = OTHER; note = 2'-O-methyl modified nucleotide with phosphorothioate linkage
  misc_difference 33: note = 2'-fluoro modified nucleotide may be attached to trivalent N-Acetylgalactosamine

SEQ ID NO: 1041 - RNA, 33 nt, synthetic construct; identical to SEQ ID NO: 591
  source 1..33: mol_type = other RNA
  misc_difference 1: note = 2'-O-methyl modified nucleotide with phosphorothioate linkage may be modified with 5'-Phosphate
  modified_base 2: mod_base = OTHER; note = 2'-fluoro modified nucleotide with phosphorothioate linkage
  modified_base 3: mod_base = OTHER; note = 2'-O-methyl modified nucleotide
  modified_base 4: mod_base = OTHER; note = 2'-fluoro modified nucleotide
  modified_base 5: mod_base = OTHER; note = 2'-O-methyl modified nucleotide
  modified_base 6: mod_base = OTHER; note = 2'-fluoro modified nucleotide
  modified_base 7: mod_base = OTHER; note = 2'-O-methyl modified nucleotide
  modified_base 8: mod_base = OTHER; note = 2'-fluoro modified nucleotide
  modified_base 9: mod_base = OTHER; note = 2'-O-methyl modified nucleotide
  modified_base 10: mod_base = OTHER; note = 2'-fluoro modified nucleotide
  modified_base 11: mod_base = OTHER; note = 2'-O-methyl modified nucleotide
  modified_base 12: mod_base = OTHER; note = 2'-fluoro modified nucleotide
  modified_base 13: mod_base = OTHER; note = 2'-O-methyl modified nucleotide
  modified_base 14: mod_base = OTHER; note = 2'-fluoro modified nucleotide with phosphorothioate linkage
  modified_base 15: mod_base = OTHER; note = 2'-O-methyl modified nucleotide with phosphorothioate linkage
  modified_base 16: mod_base = OTHER; note = 2'-fluoro modified nucleotide with phosphorothioate linkage
  modified_base 17: mod_base = OTHER; note = 2'-O-methyl modified nucleotide with phosphorothioate linkage
  modified_base 18: mod_base = OTHER; note = 2'-fluoro modified nucleotide with phosphorothioate linkage
  modified_base 19: mod_base = OTHER; note = 2'-O-methyl modified nucleotide with phosphorothioate linkage
  modified_base 20: mod_base = OTHER; note = 2'-O-methyl modified nucleotide
  modified_base 21: mod_base = OTHER; note = 2'-fluoro modified nucleotide
  modified_base 22: mod_base = OTHER; note = 2'-O-methyl modified nucleotide
  modified_base 23: mod_base = OTHER; note = 2'-fluoro modified nucleotide
  modified_base 24: mod_base = OTHER; note = 2'-O-methyl modified nucleotide
  modified_base 25: mod_base = OTHER; note = 2'-fluoro modified nucleotide
  modified_base 26: mod_base = OTHER; note = 2'-O-methyl modified nucleotide
  modified_base 27: mod_base = OTHER; note = 2'-fluoro modified nucleotide
  modified_base 28: mod_base = OTHER; note = 2'-O-methyl modified nucleotide
  modified_base 29: mod_base = OTHER; note = 2'-fluoro modified nucleotide
  modified_base 30: mod_base = OTHER; note = 2'-O-methyl modified nucleotide
  modified_base 31: mod_base = OTHER; note = 2'-fluoro modified nucleotide with phosphorothioate linkage
  modified_base 32: mod_base = OTHER; note = 2'-O-methyl modified nucleotide with phosphorothioate linkage
  misc_difference 33: note = 2'-fluoro modified nucleotide may be attached to trivalent N-Acetylgalactosamine

SEQ ID NO: 1042 - RNA, 33 nt, synthetic construct; identical to SEQ ID NO: 592
  source 1..33: mol_type = other RNA
  misc_difference 1: note = 2'-O-methyl modified nucleotide with phosphorothioate linkage may be modified with 5'-Phosphate
  modified_base 2: mod_base = OTHER; note = 2'-fluoro modified nucleotide with phosphorothioate linkage
  modified_base 3: mod_base = OTHER; note = 2'-O-methyl modified nucleotide
  modified_base 4: mod_base = OTHER; note = 2'-fluoro modified nucleotide
  modified_base 5: mod_base = OTHER; note = 2'-O-methyl modified nucleotide
  modified_base 6: mod_base = OTHER; note = 2'-fluoro modified nucleotide
  modified_base 7: mod_base = OTHER; note = 2'-O-methyl modified nucleotide
  modified_base 8: mod_base = OTHER; note = 2'-fluoro modified nucleotide
  modified_base 9: mod_base = OTHER; note = 2'-O-methyl modified nucleotide
  modified_base 10: mod_base = OTHER; note = 2'-fluoro modified nucleotide
  modified_base 11: mod_base = OTHER; note = 2'-O-methyl modified nucleotide
  modified_base 12: mod_base = OTHER; note = 2'-fluoro modified nucleotide
  modified_base 13: mod_base = OTHER; note = 2'-O-methyl modified nucleotide
  modified_base 14: mod_base = OTHER; note = 2'-fluoro modified nucleotide with phosphorothioate linkage
  modified_base 15: mod_base = OTHER; note = 2'-O-methyl modified nucleotide with phosphorothioate linkage
  modified_base 16: mod_base = OTHER; note = 2'-fluoro modified nucleotide with phosphorothioate linkage
  modified_base 17: mod_base = OTHER; note = 2'-O-methyl modified nucleotide with phosphorothioate linkage
  modified_base 18: mod_base = OTHER; note = 2'-fluoro modified nucleotide with phosphorothioate linkage
  modified_base 19: mod_base = OTHER; note = 2'-O-methyl modified nucleotide with phosphorothioate linkage
  modified_base 20: mod_base = OTHER; note = 2'-O-methyl modified nucleotide
  modified_base 21: mod_base = OTHER; note = 2'-fluoro modified nucleotide
  modified_base 22: mod_base = OTHER; note = 2'-O-methyl modified nucleotide
  modified_base 23: mod_base = OTHER; note = 2'-fluoro modified nucleotide
  modified_base 24: mod_base = OTHER; note = 2'-O-methyl modified nucleotide
  modified_base 25: mod_base = OTHER; note = 2'-fluoro modified nucleotide
  modified_base 26: mod_base = OTHER; note = 2'-O-methyl modified nucleotide
  modified_base 27: mod_base = OTHER; note = 2'-fluoro modified nucleotide
  modified_base 28: mod_base = OTHER; note = 2'-O-methyl modified nucleotide
  modified_base 29: mod_base = OTHER; note = 2'-fluoro modified nucleotide
  modified_base 30: mod_base = OTHER; note = 2'-O-methyl modified nucleotide
  modified_base 31: mod_base = OTHER; note = 2'-fluoro modified nucleotide with phosphorothioate linkage
  modified_base 32: mod_base = OTHER; note = 2'-O-methyl modified nucleotide with phosphorothioate linkage
  misc_difference 33: note = 2'-fluoro modified nucleotide may be attached to trivalent N-Acetylgalactosamine

SEQ ID NO: 1043 - RNA, 33 nt, synthetic construct
  source 1..33: mol_type = other RNA
  misc_difference 1: note = 2'-O-methyl modified nucleotide with phosphorothioate linkage may be modified with 5'-Phosphate
  modified_base 2: mod_base = OTHER; note = 2'-fluoro modified nucleotide with phosphorothioate linkage
  modified_base 3: mod_base = OTHER; note = 2'-O-methyl modified nucleotide
  modified_base 4: mod_base = OTHER; note = 2'-fluoro modified nucleotide
  modified_base 5: mod_base = OTHER; note = 2'-O-methyl modified nucleotide
  modified_base 6: mod_base = OTHER; note = 2'-fluoro modified nucleotide
  modified_base 7: mod_base = OTHER; note = 2'-O-methyl modified nucleotide
  modified_base 8: mod_base = OTHER; note = 2'-fluoro modified nucleotide
  modified_base 9: mod_base = OTHER; note = 2'-O-methyl modified nucleotide
  modified_base 10: mod_base = OTHER; note = 2'-fluoro modified nucleotide
  modified_base 11: mod_base = OTHER; note = 2'-O-methyl modified nucleotide
  modified_base 12: mod_base = OTHER; note = 2'-fluoro modified nucleotide
  modified_base 13: mod_base = OTHER; note = 2'-O-methyl modified nucleotide
  modified_base 14: mod_base = OTHER; note = 2'-fluoro modified nucleotide with phosphorothioate linkage
  modified_base 15: mod_base = OTHER; note = 2'-O-methyl modified nucleotide with phosphorothioate linkage
  modified_base 16: mod_base = OTHER; note = 2'-fluoro modified nucleotide with phosphorothioate linkage
  modified_base 17: mod_base = OTHER; note = 2'-O-methyl modified nucleotide with phosphorothioate linkage
  modified_base 18: mod_base = OTHER; note = 2'-fluoro modified nucleotide with phosphorothioate linkage
  modified_base 19: mod_base = OTHER; note = 2'-O-methyl modified nucleotide with phosphorothioate linkage
  modified_base 20: mod_base = OTHER; note = 2'-O-methyl modified nucleotide
  modified_base 21: mod_base = OTHER; note = 2'-fluoro modified nucleotide
  modified_base 22: mod_base = OTHER; note = 2'-O-methyl modified nucleotide
  modified_base 23: mod_base = OTHER; note = 2'-fluoro modified nucleotide
  modified_base 24: mod_base = OTHER; note = 2'-O-methyl modified nucleotide
  modified_base 25: mod_base = OTHER; note = 2'-fluoro modified nucleotide
  modified_base 26: mod_base = OTHER; note = 2'-O-methyl modified nucleotide
  modified_base 27: mod_base = OTHER; note = 2'-fluoro modified nucleotide
  modified_base 28: mod_base = OTHER; note = 2'-O-methyl modified nucleotide
  modified_base 29: mod_base = OTHER; note = 2'-fluoro modified nucleotide
  modified_base 30: mod_base = OTHER; note = 2'-O-methyl modified nucleotide
  modified_base 31: mod_base = OTHER; note = 2'-fluoro modified nucleotide with phosphorothioate linkage
  modified_base 32: mod_base = OTHER; note = 2'-O-methyl modified nucleotide with phosphorothioate linkage
  misc_difference 33: note = 2'-fluoro modified nucleotide may be attached to trivalent N-Acetylgalactosamine
tcaaagcttctctcttcaagagagaagctttga

SEQ ID NO: 1044 - RNA, 33 nt, synthetic construct
  source 1..33: mol_type = other RNA
  misc_difference 1: note = 2'-O-methyl modified nucleotide with phosphorothioate linkage may be modified with 5'-Phosphate
  modified_base 2: mod_base = OTHER; note = 2'-fluoro modified nucleotide with phosphorothioate linkage
  modified_base 3: mod_base = OTHER; note = 2'-O-methyl modified nucleotide
  modified_base 4: mod_base = OTHER; note = 2'-fluoro modified nucleotide
  modified_base 5: mod_base = OTHER; note = 2'-O-methyl modified nucleotide
  modified_base 6: mod_base = OTHER; note = 2'-fluoro modified nucleotide
  modified_base 7: mod_base = OTHER; note = 2'-O-methyl modified nucleotide
  modified_base 8: mod_base = OTHER; note = 2'-fluoro modified nucleotide
  modified_base 9: mod_base = OTHER; note = 2'-O-methyl modified nucleotide
  modified_base 10: mod_base = OTHER; note = 2'-fluoro modified nucleotide
  modified_base 11: mod_base = OTHER; note = 2'-O-methyl modified nucleotide
  modified_base 12: mod_base = OTHER; note = 2'-fluoro modified nucleotide
  modified_base 13: mod_base = OTHER; note = 2'-O-methyl modified nucleotide
  modified_base 14: mod_base = OTHER; note = 2'-fluoro modified nucleotide with phosphorothioate linkage
  modified_base 15: mod_base = OTHER; note = 2'-O-methyl modified nucleotide with phosphorothioate linkage
  modified_base 16: mod_base = OTHER; note = 2'-fluoro modified nucleotide with phosphorothioate linkage
  modified_base 17: mod_base = OTHER; note = 2'-O-methyl modified nucleotide with phosphorothioate linkage
  modified_base 18: mod_base = OTHER; note = 2'-fluoro modified nucleotide with phosphorothioate linkage
  modified_base 19: mod_base = OTHER; note = 2'-O-methyl modified nucleotide with phosphorothioate linkage
  modified_base 20: mod_base = OTHER; note = 2'-O-methyl modified nucleotide
  modified_base 21: mod_base = OTHER; note = 2'-fluoro modified nucleotide
  modified_base 22: mod_base = OTHER; note = 2'-O-methyl modified nucleotide
  modified_base 23: mod_base = OTHER; note = 2'-fluoro modified nucleotide
  modified_base 24: mod_base = OTHER; note = 2'-O-methyl modified nucleotide
  modified_base 25: mod_base = OTHER; note = 2'-fluoro modified nucleotide
  modified_base 26: mod_base = OTHER; note = 2'-O-methyl modified nucleotide
  modified_base 27: mod_base = OTHER; note = 2'-fluoro modified nucleotide
  modified_base 28: mod_base = OTHER; note = 2'-O-methyl modified nucleotide
  modified_base 29: mod_base = OTHER; note = 2'-fluoro modified nucleotide
  modified_base 30: mod_base = OTHER; note = 2'-O-methyl modified nucleotide
  modified_base 31: mod_base = OTHER; note = 2'-fluoro modified nucleotide with phosphorothioate linkage
  modified_base 32: mod_base = OTHER; note = 2'-O-methyl modified nucleotide with phosphorothioate linkage
  misc_difference 33: note = 2'-fluoro modified nucleotide may be attached to trivalent N-Acetylgalactosamine
tggaactcctttcgtctgccgaaaggagttcca

SEQ ID NO: 1045 - RNA, 33 nt, synthetic construct; identical to SEQ ID NO: 595
  source 1..33: mol_type = other RNA
  misc_difference 1: note = 2'-O-methyl modified nucleotide with phosphorothioate linkage may be modified with 5'-Phosphate
  modified_base 2: mod_base = OTHER; note = 2'-fluoro modified nucleotide with phosphorothioate linkage
  modified_base 3: mod_base = OTHER; note = 2'-O-methyl modified nucleotide
  modified_base 4: mod_base = OTHER; note = 2'-fluoro modified nucleotide
  modified_base 5: mod_base = OTHER; note = 2'-O-methyl modified nucleotide
  modified_base 6: mod_base = OTHER; note = 2'-fluoro modified nucleotide
  modified_base 7: mod_base = OTHER; note = 2'-O-methyl modified nucleotide
  modified_base 8: mod_base = OTHER; note = 2'-fluoro modified nucleotide
  modified_base 9: mod_base = OTHER; note = 2'-O-methyl modified nucleotide
  modified_base 10: mod_base = OTHER; note = 2'-fluoro modified nucleotide
  modified_base 11: mod_base = OTHER; note = 2'-O-methyl modified nucleotide
  modified_base 12: mod_base = OTHER; note = 2'-fluoro modified nucleotide
  modified_base 13: mod_base = OTHER; note = 2'-O-methyl modified nucleotide
  modified_base 14: mod_base = OTHER; note = 2'-fluoro modified nucleotide with phosphorothioate linkage
  modified_base 15: mod_base = OTHER; note = 2'-O-methyl modified nucleotide with phosphorothioate linkage
  modified_base 16: mod_base = OTHER; note = 2'-fluoro modified nucleotide with phosphorothioate linkage
  modified_base 17: mod_base = OTHER; note = 2'-O-methyl modified nucleotide with phosphorothioate linkage
  modified_base 18: mod_base = OTHER; note = 2'-fluoro modified nucleotide with phosphorothioate linkage
  modified_base 19: mod_base = OTHER; note = 2'-O-methyl modified nucleotide with phosphorothioate linkage
  modified_base 20: mod_base = OTHER; note = 2'-O-methyl modified nucleotide
  modified_base 21: mod_base = OTHER; note = 2'-fluoro modified nucleotide
  modified_base 22: mod_base = OTHER; note = 2'-O-methyl modified nucleotide
  modified_base 23: mod_base = OTHER; note = 2'-fluoro modified nucleotide
  modified_base 24: mod_base = OTHER; note = 2'-O-methyl modified nucleotide
  modified_base 25: mod_base = OTHER; note = 2'-fluoro modified nucleotide
  modified_base 26: mod_base = OTHER; note = 2'-O-methyl modified nucleotide
  modified_base 27: mod_base = OTHER; note = 2'-fluoro modified nucleotide
  modified_base 28: mod_base = OTHER; note = 2'-O-methyl modified nucleotide
  modified_base 29: mod_base = OTHER; note = 2'-fluoro modified nucleotide
  modified_base 30: mod_base = OTHER; note = 2'-O-methyl modified nucleotide
  modified_base 31: mod_base = OTHER; note = 2'-fluoro modified nucleotide with phosphorothioate linkage
  modified_base 32: mod_base = OTHER; note = 2'-O-methyl modified nucleotide with phosphorothioate linkage
  misc_difference 33: note = 2'-fluoro modified nucleotide may be attached to trivalent N-Acetylgalactosamine

SEQ ID NO: 1046 - RNA, 33 nt, synthetic construct; identical to SEQ ID NO: 596
  source 1..33: mol_type = other RNA
  misc_difference 1: note = 2'-O-methyl modified nucleotide with phosphorothioate linkage may be modified with 5'-Phosphate
  modified_base 2: mod_base = OTHER; note = 2'-fluoro modified nucleotide with phosphorothioate linkage
  modified_base 3: mod_base = OTHER; note = 2'-O-methyl modified nucleotide
  modified_base 4: mod_base = OTHER; note = 2'-fluoro modified nucleotide
  modified_base 5: mod_base = OTHER; note = 2'-O-methyl modified nucleotide
  modified_base 6: mod_base = OTHER; note = 2'-fluoro modified nucleotide
  modified_base 7: mod_base = OTHER; note = 2'-O-methyl modified nucleotide
  modified_base 8: mod_base = OTHER; note = 2'-fluoro modified nucleotide
  modified_base 9: mod_base = OTHER; note = 2'-O-methyl modified nucleotide
  modified_base 10: mod_base = OTHER; note = 2'-fluoro modified nucleotide
  modified_base 11: mod_base = OTHER; note = 2'-O-methyl modified nucleotide
  modified_base 12: mod_base = OTHER; note = 2'-fluoro modified nucleotide
  modified_base 13: mod_base = OTHER; note = 2'-O-methyl modified nucleotide
  modified_base 14: mod_base = OTHER; note = 2'-fluoro modified nucleotide with phosphorothioate linkage
  modified_base 15: mod_base = OTHER; note = 2'-O-methyl modified nucleotide with phosphorothioate linkage
  modified_base 16: mod_base = OTHER; note = 2'-fluoro modified nucleotide with phosphorothioate linkage
  modified_base 17: mod_base = OTHER; note = 2'-O-methyl modified nucleotide with phosphorothioate linkage
  modified_base 18: mod_base = OTHER; note = 2'-fluoro modified nucleotide with phosphorothioate linkage
  modified_base 19: mod_base = OTHER; note = 2'-O-methyl modified nucleotide with phosphorothioate linkage
  modified_base 20: mod_base = OTHER; note = 2'-O-methyl modified nucleotide
  modified_base 21: mod_base = OTHER; note = 2'-fluoro modified nucleotide
  modified_base 22: mod_base = OTHER; note = 2'-O-methyl modified nucleotide
  modified_base 23: mod_base = OTHER; note = 2'-fluoro modified nucleotide
  modified_base 24: mod_base = OTHER; note = 2'-O-methyl modified nucleotide
  modified_base 25: mod_base = OTHER; note = 2'-fluoro modified nucleotide
  modified_base 26: mod_base = OTHER; note = 2'-O-methyl modified nucleotide
  modified_base 27: mod_base = OTHER; note = 2'-fluoro modified nucleotide
  modified_base 28: mod_base = OTHER; note = 2'-O-methyl modified nucleotide
  modified_base 29: mod_base = OTHER; note = 2'-fluoro modified nucleotide
  modified_base 30: mod_base = OTHER; note = 2'-O-methyl modified nucleotide
  modified_base 31: mod_base = OTHER; note = 2'-fluoro modified nucleotide with phosphorothioate linkage
  modified_base 32: mod_base = OTHER; note = 2'-O-methyl modified nucleotide with phosphorothioate linkage
  misc_difference 33: note = 2'-fluoro modified nucleotide may be attached to trivalent N-Acetylgalactosamine

SEQ ID NO: 1047 - RNA, 33 nt, synthetic construct
  source 1..33: mol_type = other RNA
  misc_difference 1: note = 2'-O-methyl modified nucleotide with phosphorothioate linkage may be modified with 5'-Phosphate
  modified_base 2: mod_base = OTHER; note = 2'-fluoro modified nucleotide with phosphorothioate linkage
  modified_base 3: mod_base = OTHER; note = 2'-O-methyl modified nucleotide
  modified_base 4: mod_base = OTHER; note = 2'-fluoro modified nucleotide
  modified_base 5: mod_base = OTHER; note = 2'-O-methyl modified nucleotide
  modified_base 6: mod_base = OTHER; note = 2'-fluoro modified nucleotide
  modified_base 7: mod_base = OTHER; note = 2'-O-methyl modified nucleotide
  modified_base 8: mod_base = OTHER; note = 2'-fluoro modified nucleotide
  modified_base 9: mod_base = OTHER; note = 2'-O-methyl modified nucleotide
  modified_base 10: mod_base = OTHER; note = 2'-fluoro modified nucleotide
  modified_base 11: mod_base = OTHER; note = 2'-O-methyl modified nucleotide
  modified_base 12: mod_base = OTHER; note = 2'-fluoro modified nucleotide
  modified_base 13: mod_base = OTHER; note = 2'-O-methyl modified nucleotide
  modified_base 14: mod_base = OTHER; note = 2'-fluoro modified nucleotide with phosphorothioate linkage
  modified_base 15: mod_base = OTHER; note = 2'-O-methyl modified nucleotide with phosphorothioate linkage
  modified_base 16: mod_base = OTHER; note = 2'-fluoro modified nucleotide with phosphorothioate linkage
  modified_base 17: mod_base = OTHER; note = 2'-O-methyl modified nucleotide with phosphorothioate linkage
  modified_base 18: mod_base = OTHER; note = 2'-fluoro modified nucleotide with phosphorothioate linkage
  modified_base 19: mod_base = OTHER; note = 2'-O-methyl modified nucleotide with phosphorothioate linkage
  modified_base 20: mod_base = OTHER; note = 2'-O-methyl modified nucleotide
  modified_base 21: mod_base = OTHER; note = 2'-fluoro modified nucleotide
  modified_base 22: mod_base = OTHER; note = 2'-O-methyl modified nucleotide
  modified_base 23: mod_base = OTHER; note = 2'-fluoro modified nucleotide
  modified_base 24: mod_base = OTHER; note = 2'-O-methyl modified nucleotide
  modified_base 25: mod_base = OTHER; note = 2'-fluoro modified nucleotide
  modified_base 26: mod_base = OTHER; note = 2'-O-methyl modified nucleotide
  modified_base 27: mod_base = OTHER; note = 2'-fluoro modified nucleotide
  modified_base 28: mod_base = OTHER; note = 2'-O-methyl modified nucleotide
  modified_base 29: mod_base = OTHER; note = 2'-fluoro modified nucleotide
  modified_base 30: mod_base = OTHER; note = 2'-O-methyl modified nucleotide
  modified_base 31: mod_base = OTHER; note = 2'-fluoro modified nucleotide with phosphorothioate linkage
  modified_base 32: mod_base = OTHER; note = 2'-O-methyl modified nucleotide with phosphorothioate linkage
  misc_difference 33: note = 2'-fluoro modified nucleotide may be attached to trivalent N-Acetylgalactosamine
tagaagtcctatagttgtactataggacttcta

SEQ ID NO: 1048 - RNA, 33 nt, synthetic construct
  source 1..33: mol_type = other RNA
  misc_difference 1: note = 2'-O-methyl modified nucleotide with phosphorothioate linkage may be modified with 5'-Phosphate
  modified_base 2: mod_base = OTHER; note = 2'-fluoro modified nucleotide with phosphorothioate linkage
  modified_base 3: mod_base = OTHER; note = 2'-O-methyl modified nucleotide
  modified_base 4: mod_base = OTHER; note = 2'-fluoro modified nucleotide
  modified_base 5: mod_base = OTHER; note = 2'-O-methyl modified nucleotide
  modified_base 6: mod_base = OTHER; note = 2'-fluoro modified nucleotide
  modified_base 7: mod_base = OTHER; note = 2'-O-methyl modified nucleotide
  modified_base 8: mod_base = OTHER; note = 2'-fluoro modified nucleotide
  modified_base 9: mod_base = OTHER; note = 2'-O-methyl modified nucleotide
  modified_base 10: mod_base = OTHER; note = 2'-fluoro modified nucleotide
  modified_base 11: mod_base = OTHER; note = 2'-O-methyl modified nucleotide
  modified_base 12: mod_base = OTHER; note = 2'-fluoro modified nucleotide
  modified_base 13: mod_base = OTHER; note = 2'-O-methyl modified nucleotide
  modified_base 14: mod_base = OTHER; note = 2'-fluoro modified nucleotide with phosphorothioate linkage
  modified_base 15: mod_base = OTHER; note = 2'-O-methyl modified nucleotide with phosphorothioate linkage
  modified_base 16: mod_base = OTHER; note = 2'-fluoro modified nucleotide with phosphorothioate linkage
  modified_base 17: mod_base = OTHER; note = 2'-O-methyl modified nucleotide with phosphorothioate linkage
  modified_base 18: mod_base = OTHER; note = 2'-fluoro modified nucleotide with phosphorothioate linkage
  modified_base 19: mod_base = OTHER; note = 2'-O-methyl modified nucleotide with phosphorothioate linkage
  modified_base 20: mod_base = OTHER; note = 2'-O-methyl modified nucleotide
  modified_base 21: mod_base = OTHER; note = 2'-fluoro modified nucleotide
  modified_base 22: mod_base = OTHER; note = 2'-O-methyl modified nucleotide
  modified_base 23: mod_base = OTHER; note = 2'-fluoro modified nucleotide
  modified_base 24: mod_base = OTHER; note = 2'-O-methyl modified nucleotide
  modified_base 25: mod_base = OTHER; note = 2'-fluoro modified nucleotide
  modified_base 26: mod_base = OTHER; note = 2'-O-methyl modified nucleotide
  modified_base 27: mod_base = OTHER; note = 2'-fluoro modified nucleotide
  modified_base 28: mod_base = OTHER; note = 2'-O-methyl modified nucleotide
  modified_base 29: mod_base = OTHER; note = 2'-fluoro modified nucleotide
  modified_base 30: mod_base = OTHER; note = 2'-O-methyl modified nucleotide
  modified_base 31: mod_base = OTHER; note = 2'-fluoro modified nucleotide with phosphorothioate linkage
  modified_base 32: mod_base = OTHER; note = 2'-O-methyl modified nucleotide with phosphorothioate linkage
  misc_difference 33: note = 2'-fluoro modified nucleotide may be attached to trivalent N-Acetylgalactosamine
tataacttttaatagagattattaaaagttata

SEQ ID NO: 1049 - RNA, 33 nt, synthetic construct
  source 1..33: mol_type = other RNA
  misc_difference 1: note = 2'-O-methyl modified nucleotide with phosphorothioate linkage may be modified with 5'-Phosphate
  modified_base 2: mod_base = OTHER; note = 2'-fluoro modified nucleotide with phosphorothioate linkage
  modified_base 3: mod_base = OTHER; note = 2'-O-methyl modified nucleotide
  modified_base 4: mod_base = OTHER; note = 2'-fluoro modified nucleotide
  modified_base 5: mod_base = OTHER; note = 2'-O-methyl modified nucleotide
  modified_base 6: mod_base = OTHER; note = 2'-fluoro modified nucleotide
  modified_base 7: mod_base = OTHER; note = 2'-O-methyl modified nucleotide
  modified_base 8: mod_base = OTHER; note = 2'-fluoro modified nucleotide
  modified_base 9: mod_base = OTHER; note = 2'-O-methyl modified nucleotide
  modified_base 10: mod_base = OTHER; note = 2'-fluoro modified nucleotide
  modified_base 11: mod_base = OTHER; note = 2'-O-methyl modified nucleotide
  modified_base 12: mod_base = OTHER; note = 2'-fluoro modified nucleotide
  modified_base 13: mod_base = OTHER; note = 2'-O-methyl modified nucleotide
  modified_base 14: mod_base = OTHER; note = 2'-fluoro modified nucleotide with phosphorothioate linkage
  modified_base 15: mod_base = OTHER; note = 2'-O-methyl modified nucleotide with phosphorothioate linkage
  modified_base 16: mod_base = OTHER; note = 2'-fluoro modified nucleotide with phosphorothioate linkage
  modified_base 17: mod_base = OTHER; note = 2'-O-methyl modified nucleotide with phosphorothioate linkage
  modified_base 18: mod_base = OTHER; note = 2'-fluoro modified nucleotide with phosphorothioate linkage
  modified_base 19: mod_base = OTHER; note = 2'-O-methyl modified nucleotide with phosphorothioate linkage
  modified_base 20: mod_base = OTHER; note = 2'-O-methyl modified nucleotide
  modified_base 21: mod_base = OTHER; note = 2'-fluoro modified nucleotide
  modified_base 22: mod_base = OTHER; note = 2'-O-methyl modified nucleotide
  modified_base 23: mod_base = OTHER; note = 2'-fluoro modified nucleotide
  modified_base 24: mod_base = OTHER; note = 2'-O-methyl modified nucleotide
  modified_base 25: mod_base = OTHER; note = 2'-fluoro modified nucleotide
  modified_base 26: mod_base = OTHER; note = 2'-O-methyl modified nucleotide
  modified_base 27: mod_base = OTHER; note = 2'-fluoro modified nucleotide
  modified_base 28: mod_base = OTHER; note = 2'-O-methyl modified nucleotide
  modified_base 29: mod_base = OTHER; note = 2'-fluoro modified nucleotide
  modified_base 30: mod_base = OTHER; note = 2'-O-methyl modified nucleotide
  modified_base 31: mod_base = OTHER; note = 2'-fluoro modified nucleotide with phosphorothioate linkage
  modified_base 32: mod_base = OTHER; note = 2'-O-methyl modified nucleotide with phosphorothioate linkage
  misc_difference 33: note = 2'-fluoro modified nucleotide may be attached to trivalent N-Acetylgalactosamine
tctaagatttcttttccaaaaagaaatcttaga

SEQ ID NO: 1050 - RNA, 33 nt, synthetic construct
  source 1..33: mol_type = other RNA
  misc_difference 1: note = 2'-O-methyl modified nucleotide with phosphorothioate linkage may be modified with 5'-Phosphate
  modified_base 2: mod_base = OTHER; note = 2'-fluoro modified nucleotide with phosphorothioate linkage
  modified_base 3: mod_base = OTHER; note = 2'-O-methyl modified nucleotide
  modified_base 4: mod_base = OTHER; note = 2'-fluoro modified nucleotide
  modified_base 5: mod_base = OTHER; note = 2'-O-methyl modified nucleotide
  modified_base 6: mod_base = OTHER; note = 2'-fluoro modified nucleotide
  modified_base 7: mod_base = OTHER; note = 2'-O-methyl modified nucleotide
  modified_base 8: mod_base = OTHER; note = 2'-fluoro modified nucleotide
  modified_base 9: mod_base = OTHER; note = 2'-O-methyl modified nucleotide
  modified_base 10: mod_base = OTHER; note = 2'-fluoro modified nucleotide
  modified_base 11: mod_base = OTHER; note = 2'-O-methyl modified nucleotide
  modified_base 12: mod_base = OTHER; note = 2'-fluoro modified nucleotide
  modified_base 13: mod_base = OTHER; note = 2'-O-methyl modified nucleotide
  modified_base 14: mod_base = OTHER; note = 2'-fluoro modified nucleotide with phosphorothioate linkage
  modified_base 15: mod_base = OTHER; note = 2'-O-methyl modified nucleotide with phosphorothioate linkage
  modified_base 16: mod_base = OTHER; note = 2'-fluoro modified nucleotide with phosphorothioate linkage
  modified_base 17: mod_base = OTHER; note = 2'-O-methyl modified nucleotide with phosphorothioate linkage
  modified_base 18: mod_base = OTHER; note = 2'-fluoro modified nucleotide with phosphorothioate linkage
  modified_base 19: mod_base = OTHER; note = 2'-O-methyl modified nucleotide with phosphorothioate linkage
  modified_base 20: mod_base = OTHER; note = 2'-O-methyl modified nucleotide
  modified_base 21: mod_base = OTHER; note = 2'-fluoro modified nucleotide
  modified_base 22: mod_base = OTHER; note = 2'-O-methyl modified nucleotide
  modified_base 23: mod_base = OTHER; note = 2'-fluoro modified nucleotide
  modified_base 24: mod_base = OTHER; note = 2'-O-methyl modified nucleotide
  modified_base 25: mod_base = OTHER; note = 2'-fluoro modified nucleotide
  modified_base 26: mod_base = OTHER; note = 2'-O-methyl modified nucleotide
  modified_base 27: mod_base = OTHER; note = 2'-fluoro modified nucleotide
  modified_base 28: mod_base = OTHER; note = 2'-O-methyl modified nucleotide
  modified_base 29: mod_base = OTHER; note = 2'-fluoro modified nucleotide
  modified_base 30: mod_base = OTHER; note = 2'-O-methyl modified nucleotide
  modified_base 31: mod_base = OTHER; note = 2'-fluoro modified nucleotide with phosphorothioate linkage
  modified_base 32: mod_base = OTHER; note = 2'-O-methyl modified nucleotide with phosphorothioate linkage
  misc_difference 33: note = 2'-fluoro modified nucleotide may be attached to trivalent N-Acetylgalactosamine
tataaatgaacatggcctgcatgttcatttata

1. An oligomeric compound for inhibiting expression of complement component C5, wherein the compound comprises a single nucleotide strand, wherein said single strand consists of a modified or unmodified oligonucleotide comprising a first nucleobase sequence selected from the group consisting of SEQ ID NOs: 1 to 250 linked directly to a second nucleobase sequence selected respectively from the group consisting of SEQ ID NOs: 251 to 500, wherein said single strand has a total length of 33 or 34 nucleosides.

2. (canceled)

3. The oligomeric compound according to claim 1, wherein the modified or unmodified nucleotide has a nucleobase sequence that consists of: SEQ ID NOs: 61 and 311, 30 and 280, 37 and 287, 87 and 337, 55 and 305, 66 and 316, 23 and 273, 83 and 333, 43 and 293, 47 and 297, 72 and 322, 27 and 277, 14 and 264, 28 and 278, 46 and 296, 82 and 332, 74 and 324, 75 and 325, 73 and 323, 53 and 303, 16 and 266, 36 and 286, 59 and 309, 42 and 292, and 56 and 306, or a portion thereof.

4-12. (canceled)

13. The oligomeric compound according to claim 1, which further comprises one or more ligands.

14. The oligomeric compound according to claim 13, wherein said one or more ligands are conjugated to the second region of linked nucleosides and/or the first region of linked nucleosides.

15. The oligomeric compound according to claim 14, wherein said one or more ligands are conjugated at the 3′ terminal nucleoside of the second region of linked nucleosides and/or the 5′ terminal nucleoside of the second region of linked nucleosides.

16. The oligomeric compound according to claim 13, wherein said one or more ligands bind cellular membrane or a specific target on cellular surface.

17-20. (canceled)

21. The oligomeric compound according to claim 16, wherein said one or more ligands comprise one or more N-Acetyl-Galactosamine moieties.

21-23. (canceled)

24. The oligomeric compound according to claim 21, wherein the one or more N-Acetyl-Galactosamine moieties are attached to the oligomeric compound as a biantennary or triantennary configuration.

25-31. (canceled)

32. The oligomeric compound according to claim 1, wherein said single strand has a nucleobase sequence selected from the group consisting of SEQ ID NOs: 561, 530, 537, 587, 555, 566, 523, 583, 543, 547, 572, 527, 514, 528, 546, 582, 574, 575, 573, 553, 516, 536, 559, 542, and 556.

33. The oligomeric compound according to claim 32, wherein the single strand is selected from the group consisting of SEQ ID NOs: 1011, 980, 987, 1037, 1005, 1016, 973, 1033, 993, 997, 1022, 977, 964, 978, 996, 1032, 1024, 1025, 1023, 1003, 966, 986, 1009, 992, 1006.

34-36. (canceled)

37. The oligomeric compound according to claim 1, which comprises internucleoside linkages and wherein at least one internucleoside linkage is a modified internucleoside linkage.

38-39. (canceled)

40. The oligomeric compound according to claim 37, which comprises 7, 8, 9 or 10 phosphorothioate or phosphorodithioate internucleoside linkages.

41-44. (canceled)

45. The oligomeric compound according to claim 1, wherein at least one nucleoside comprises a modified sugar selected from the group consisting of a 2′-O-alkyl modified sugar, 2′-O-methyl modified sugar, 2′-O-methoxyethyl modified sugar, 2′-O-allyl modified sugar, 2′-C-allyl modified sugar, 2′-deoxy modified sugar, 2′-F modified sugar, 2′-arabino-fluoro modified sugar, 2′-O-benzyl modified sugar, and 2′-O-methyl-4-pyridine modified sugar.

46-77. (canceled)

78. The oligomeric compound according to claim 1, wherein the modified nucleotide has a nucleobase sequence that consists of first region is selected from the group consisting of SEQ ID NOs: 811 and 911, 780 and 880, 787 and 887, 837 and 937, 805 and 905, 816 and 916, 773 and 873, 833 and 933, 793 and 893, 797 and 897, 822 and 922, 777 and 877, 764 and 864, 778 and 878, 796 and 896, 832 and 932, 824 and 924, 825 and 925, 823 and 923, 803 and 903, 766 and 866, 786 and 886, 809 and 909, 792 and 892, and 806 and 906.

79-81. (canceled)

82. A nucleic acid construct comprising at least:
(a) a first nucleic acid portion that is at least partially complementary to at least a first portion of an RNA, which is transcribed from an C5 gene;
(b) a second nucleic acid portion that is at least partially complementary to at least a second portion of an RNA, which is transcribed from an C5 gene, the second portion being different from the first portion;
(c) a third nucleic acid portion that is at least partially complementary to the first nucleic acid portion of (a), so as to form a first nucleic acid duplex region therewith;
(d) a fourth nucleic acid portion that is at least partially complementary to the second nucleic acid portion of (b), so as to form a second nucleic acid duplex region therewith,
wherein the construct is designed such that subsequent to in vivo administration the construct disassembles to yield at least first and second discrete nucleic acid targeting molecules that respectively target the RNA portions transcribed from the target genes of (a) and (b);
whereby (i) the first nucleic acid targeting molecule is capable of modulating expression of the target gene of (a), and comprises, or is derived from, at least the first nucleic acid portion of (a), and (ii) the second nucleic acid targeting molecule is capable of modulating expression of the target gene of (b), and comprises, or is derived from, the second nucleic acid portion of (b).

83-153. (canceled)

154. The construct of claim 82, wherein
(a) the first nucleic acid portion is selected from the group consisting of SEQ ID Nos. 751-850;
(b) the second nucleic acid portion is selected from the group consisting of SEQ ID Nos. 751-850;
(c) the third nucleic acid portion is selected from the group consisting of SEQ ID Nos. 851-950; and/or
(d) the fourth nucleic acid portion is selected from the group consisting of SEQ ID Nos. 851-950.

155-162. (canceled)

163. A pharmaceutical composition comprising an oligomeric compound according to claim 1 and a pharmaceutically acceptable excipient, diluent, antioxidant, and/or preservative.

164-165. (canceled)

166. The pharmaceutical composition of claim 163, further comprising one or more further pharmaceutically active agents.

167-174. (canceled)

175. A method of treating a C5-associated disease or disorder or a disease requiring reduced C5 expression, comprising administering to a patient suffering from said disease or disorder a therapeutically effective amount of an oligomeric compound according to claim 1, wherein said disease or disorder is selected from the group consisting of autoimmune disease, complement system dysfunction including aberrant upregulation of complement components such as C5, age-related macular degeneration (AMD) including dry AMD and geographic atrophy, paroxysmal nocturnal hemoglobinuria (PNH), Generalized myasthenia gravis (gMG), Lupus nephritis (LN), Alzheimer's disease, Atherosclerosis, Inflammation of the choroid plexus, atypical hemolytic uremic syndrome (aHUS), C3 glomerulopathy (C3G), lg-mediated kidney pathologies such as IgA nephropathy and primary membranous nephropathy, asthma, rheumatic disease, rheumatoid arthritis, systemic lupus erythematosus (SLE), anti-neutrophil cytoplasmic antibody (ANCA) vasculitis, antiphospholipid antibody syndrome (APS), glomerulonephritis, dermatomyositis bullous pemphigoid, Shiga toxin E. coli-related hemolytic uremic syndrome, amyotrophic lateral sclerosis (ALS), Central nervous system (CNS) diseases, myasthenia gravis (MG), neuromyelistis optica (NMO), dense deposit disease, C3 neuropathy, cold agglutinin disease, humoral and vascular transplant rejection, graft dysfunction, myocardial infarction, asthma, rheumatoid arthritis (RA) sensitization towards a transplant, antiphospho lipid antibody syndrome; lupus nephritis; ischemia-reperfusion injury; typical or infectious hemolytic uremic syndrome (tHUS); dense deposit disease (DDD); neuromyelitis optica (N O); multifocal motor neuropathy (MMN); multiple sclerosis (MS); macular degeneration (e.g., age-related macular degeneration (AM_D)); hemolysis, elevated liver enzymes, and low platelets (HELLP) syndrome; thrombotic thrombocytopenia purpura (TTP); spontaneous fetal loss; Pauci-immune vasculitis; epidermolysis bullosa; recurrent fetal loss; pre-eclampsia, traumatic brain injury, myasthenia gravis, cold agglutinin disease, dermatomyositis bullous pemphigoid, Shiga toxin E. co/-related hemolytic uremic syndrome, C3 nephropathy, anti-neutrophil cytoplasmic antibody-associated vasculitis, humoral and vascular transplant rejection, graft dysfunction, myocardial infarction, an allogenic transplant, sepsis, Coronary artery disease, dermatomyositis, Graves' disease, atherosclerosis, systemic inflammatory response sepsis, septic shock, spinal cord injury, glomerulonephritis, Hashimoto's thyroiditis, type I diabetes, pemphigus, autoimmune hemolytic anemia (AIHA), ITP, Goodpasture syndrome, Degos disease, antiphospholipid syndrome (APS), catastrophic APS (CAPS), a cardiovascular disorder, myocarditis, a cerebrovascular disorder, a peripheral vascular disorder, a renovascular disorder, a mesenteric/enteric vascular disorder, vasculitis, Henoch-Schonlein purpura nephritis, systemic lupus erythematosus-associated vasculitis, vasculitis associated with rheumatoid arthritis, immune comple vasculitis, Takayasu's disease, dilated cardiomyopathy, diabetic angiopathy, Kawasaki's disease (arteritis), venous gas embolus (VGE), and restenosis following stent placement, rotational atherectomy, membraneous nephropathy, Guiliain-Barre syndrome, and percutaneous transluminal coronary angioplasty Age-related macular degeneration (AMD) and/or Geographic atrophy (GA); Uveitis and/or panuveitis; Cold agglutinin disease, Membranoproliferative glomerulonephritis (MPGN), Guillain-Barre syndrome, Shiga toxin-producing E. coli hemolytic-uremic syndrome (STEC-HUS), organ transplantation-associated autoimmune diseases, and sepsis.

176-178. (canceled)

179. The oligomeric compound according to claim 33, wherein the single strand is selected from the group consisting of SEQ ID NOs: 980 and 987.
